(19) United States
(12) Patent Application Publication
(10) Pub. No.: US 2008/0299042 A1
(43) Pub. Date: Dec. 4, 2008

(54) Membrane Associated Molecules

(75) Inventors: Pamela Bechtel, San Diego, CA (US); Mark Daniels, San Diego, CA (US); Karen McLachlan, Del Mar, CA (US); Yufeng Zhai, San Diego, CA (US); Benjamin L. Colson, Carlsbad, CA (US); Nicole W. O'Brien, San Marcos, CA (US)

Correspondence Address: STERNE, KESSLER, GOLDSTEIN & FOX, P.L.L.C., 1100 NEW YORK AVE., N.W., WASHINGTON, DC, 20005, US

(73) Assignee: Biogen Idec MA Inc., Cambridge, MA (US)

(21) Appl. No.: 11/579,106

(22) PCT Filed: May 2, 2005
(86) PCT No.: PCT/US2005/015207

§ 371 Date: May 12, 2008

Related U.S. Application Data
(60) Provisional application No. 60/567,187, filed on Apr. 30, 2004.

(51) Int. Cl. A61K 49/00; C40B 40/08; C40B 50/02; C07H 21/00; A61P 31/00; C07K 14/00; A61K 39/395; G01N 33/574

(52) U.S. Cl. 424/9.1; 506/17; 506/24; 424/138.1; 435/7.23; 536/23.5; 530/350

(57) ABSTRACT

The present invention is directed to novel methods of treating, identifying or diagnosing a hyperproliferative disorder in a patient in need thereof. The methods of the invention include administering to a patient a composition comprising a binding molecule which binds to a cell surface expressed glycoprotein expressed predominantly in tumor or tumor-associated cells. In particular, the therapeutic and diagnostic methods of the present invention include the use of a binding molecule, for example an antibody or immunospecific fragment thereof, which specifically binds to a membrane associated molecule, variant polypeptide or fragment thereof. The present invention is based, at least in part, on the discovery of membrane associated proteins, i.e., nucleic acid molecules which encode membrane proteins and the use of these molecules to generate custom arrays to screen for markers associated with various diseases and disorders, e.g., cancer, e.g., lung, colon, pancreatic and ovarian cancer and autoimmune diseases or disorders. The invention further relates to various methods, reagents and kits for diagnosing, staging, prognosing, monitoring and treating hyperproliferative diseases or disorders such as cancer, e.g., lung, colon, pancreatic and ovarian cancer and autoimmune diseases or disorders.

### BACKGROUND OF THE INVENTION

[0001] This application includes a “Sequence Listing,” which is provided as an electronic document on a compact disc (CD-R). This compact disc contains the file “Sequence Listing.txt” (4,348,000 bytes, created on Apr. 29, 2005), which is hereby incorporated by reference in its entirety.

### FIELD OF THE INVENTION

[0002] This invention relates to nucleic acid molecules that encode membrane associated proteins, the proteins themselves, as well as methods for identifying membrane associated molecules. The invention further relates to methods of applying these membrane associated molecules on array(s) and utilizing the array(s) to identify markers associated with hyperproliferative diseases or disorders, such as cancer and autoimmune diseases.

[0003] The present invention is further directed to novel methods of treating and diagnosing hyperproliferative disorders utilizing binding molecules which bind to polypeptides expressed predominantly in tumor or tumor-associated cells.

### RELATED ART

[0004] Cancer afflicts approximately 1.2 million people in the United States each year. About 50% of these cancers are curable with surgery, radiation therapy, and chemotherapy. Despite significant technical advances in these three types of treatments, each year more than 500,000 people will die of cancer in the United States alone. (Jaffee, E. M., Ann. N.Y. Acad. Sci. 886:67-72 (1999)). Because most recurrences are at distant sites such as the liver, brain, bone, and lung, there is an urgent need for improved systemic therapies.

[0005] Advances have been made in detection and therapy of cancer, however no vaccine or other universally successful method for prevention or treatment is currently available. One reason for failure of a cancer treatment is often the growth of secondary metastatic lesions in distant organs. Therapy for metastasis currently relies on a combination of early diagnosis and aggressive treatment, which may include radiotherapy, chemotherapy or hormone therapy. However, the toxicity of such treatments limits the use of presently available anticancer agents for treatment of malignant disease. The high mortality rate for many cancers indicates that improvements are needed in metastasis prevention and treatment. The goal of cancer treatment is to develop modalities that specifically target tumor cells, thereby avoiding unnecessary side effects to normal tissue. Immunotherapy has the potential to provide an alternative systemic treatment for most types of cancer. The advantage of immunotherapy over radiation and chemotherapy is that it can act specifically against the tumor without causing normal tissue damage.

[0006] The development of less toxic antitumor agents would facilitate the long term treatment of latent or residual disease. Such agents could also be used prophylactically after the removal of a precancerous tumor.

[0007] Arrays of binding agents, such as oligonucleotides and polynucleotides, have become an increasingly important tool in the biotechnology industry and related fields. These arrays, in which a plurality of binding agents are deposited onto a solid support surface in the form of an array or pattern, find use in a variety of applications, including drug screening, nucleic acid sequencing, mutation analysis, and the like. One important use of arrays is in the analysis of differential gene expression, where the expression of genes in different cells, normally a cell of interest and a control, is compared and any discrepancies in expression are identified.

[0008] A variety of different array technologies have been developed in order to meet the growing need of the biotechnology industry. Despite the wide variety of array technologies currently in preparation or available on the market, many of the commercially available arrays do not contain sequences for all of the predicted genes in the human genome. In addition, a significant number of the sequences on commercial arrays are routinely ineffective. As a result, sequence databases which are generated using the sequence information on commercial arrays are often incomplete. There is therefore a continued need to produce improved arrays containing a more complete of sequences.

[0009] The amount of sequence information resulting from the rapid cloning of the genomes of species ranging from yeast to man, as well as access to databases containing cloned nucleotide sequences, provides an initial source of information from which to attempt to identify genes such as transmembrane molecules. Transmembrane molecules such as, G-protein coupled receptors (GPCR's), tyrosine kinases receptors, Fc receptors, killer cell inhibitory receptor and HIV receptors, play an essential role in the intracellular communication during the development of a multi-cellular organism. Such transmembrane molecules participate in a multitude of biological processes including cell growth, cell proliferation, cell differentiation and cell death. These proteins can also act as mediators for the transfer of signals from the external environment in to the cell itself, thereby modulating gene expression. Despite their importance in many biological processes, only a small number of transmembrane molecules have been characterized due to their complex nature and the fact that it is extremely difficult to determine their three-dimensional structures by conventional methods.

[0010] Several programs have been utilized to mine known databases for relevant sequences. TMHMM, based on the hidden Markov model (HMM) for membrane protein topology prediction, is one program utilized for mining nucleotide databases for transmembrane helices in transmembrane polypeptides (Sonnhammer et al., 1998). TMHMM specializes in modeling various regions of a membrane protein such as the helix caps, middle of the helix, regions close to the membrane, and globular domains. TMHMM is well suited for the prediction of transmembrane molecules because it can incorporate hydrophobicity, charge bias, helix lengths, and grammatical constraints into one model for which algorithms for parameter estimation and prediction already exist (Durbin et al., 1988).

[0011] Accordingly, there exists a need for identifying transmembrane proteins, as well as the nucleotide sequences encoding these proteins which are associated with a disease. Such sequences may be utilized to identify and characterize markers that may be used as potential drug targets, as well as to diagnose diseases and disorders associated with transmembrane molecules. Therefore, a major goal in the design and development of new therapies is the identification and characterization of transmembrane molecules, and applying these molecules on an array to allow for the detection of an amplification of specific DNA sequences that are associated with hyperproliferative diseases or disorders, such as cancer.

[0012] Accordingly, there is a need in the art for the development of further methods for detecting, inhibiting, and treating cancer, e.g., metastasis.

### BRIEF SUMMARY OF THE INVENTION

[0013] This invention involves the use of membrane associated proteins in the diagnosis and treatment of hyperproliferative diseases or disorders using binding molecules.

[0014] In one embodiment, the present invention provides a method for identifying membrane associated molecules which are upregulated in hyperproliferative diseases or disorders comprising: development of a unique expression array to detect membrane associated molecules, obtaining biological samples, contacting samples with the unique array and measuring expression level of the membrane associated molecules.

[0015] In another embodiment, the present invention provides a method for treating a hyperproliferative disorder in an animal, comprising administering to an animal in need of treatment a composition comprising a binding molecule which specifically binds to a membrane associated molecule, variant or fragment thereof.

[0016] In another embodiment the invention provides a method of detecting abnormal hyperproliferative cell growth in a patient, comprising: obtaining a biological sample from the patient; contacting the sample with a binding molecule which specifically binds to a membrane associated molecule, variant or fragment thereof, and assaying the expression level of the membrane associated molecule in the sample.

[0017] Yet another embodiment provides a method of diagnosing a hyperproliferative disease or disorder in a patient, comprising administering to the patient a sufficient amount of a detectably labeled binding molecule which specifically binds to a membrane associated molecule, variant or fragment thereof, waiting for a time interval following the administration to allow the binding molecule to contact the membrane associated molecule, variant or fragment thereof and detecting the amount of binding molecule which is bound to the membrane associated molecule, variant or fragment thereof in the patient.

[0018] In various embodiments, binding molecules for use in the above methods include antibodies and antigen-specific fragments thereof, fusion proteins, T-cell receptors, and small molecules.

[0019] In the above methods, binding molecules bind to polypeptide variants or fragments thereof which are at least 70% identical to membrane associated molecules selected from the group consisting of SEQ ID NOs:1288, 3446-3452 and 3458-3462. Additionally, the binding molecules of the above methods bind to polypeptide variants or fragments which comprise specific domains of the membrane associated molecules as described in Table 2 or the extracellular domains of the membrane associated molecules described in Table 3.

[0020] The invention further involves preparing therapeutic agents such as monoclonal antibodies and fusion proteins bearing extracellular binding domains that bind with high affinity and specificity to proteins that are specifically present in disease- or disorder-associated tissues, e.g., proteins that are useful targets for killing or interfering with the function of cells of the tissue that express the targeted proteins.

[0021] In another aspect, the present invention is directed to methods for the identification of nucleic acid molecules that encode membrane associated molecules, i.e., nucleic acid molecules which encode transmembrane proteins or which encode proteins with GPI link, ITIM, ITAM or ITSM motifs. It will be appreciated that one particularly preferred embodiment of the present invention comprises methods of using these identified polynucleotides to generate custom arrays to identify markers associated with selected diseases or disorders including various proliferative afflictions and autoimmune disorders. Those skilled in the art will also appreciate that the present invention further comprises the identified polynucleotides as well as the encoded membrane associated molecules and methods of their use. In another important aspect, the present invention is directed to small molecules, ligands or immunoreactive species (e.g. immunoglobulins) that bind to, or otherwise interact or associate with the membrane associated molecules or their respective polynucleotides. Still other aspects of the instant invention comprise methods of using such membrane associated molecules or compounds that interact with them for the diagnosis, prevention or treatment of various diseases or disorders e.g., cancer or autoimmune diseases or disorders. Yet other embodiments of the instant invention are enumerated below in more detail or will become apparent to the skilled artisan in view of the instant specification and examples.

[0022] In one aspect, the present invention provides an array comprising a plurality of nucleic acid molecules selected from the group consisting of the nucleotide sequences set forth in SEQ ID NOs:1-1146, 3439-3445, and 3452-3457, their complements and hybridizing fragments thereof. In another aspect, the present invention provides an array comprising a plurality of nucleic acid molecules selected from the group consisting of nucleic acid molecules having at least 70% identity with the nucleotide sequences set forth in SEQ ID NOs:1-1146, 3439-3445, and 3452-3457, their complements and hybridizing fragments thereof. In still another aspect, the invention provides an array comprising a plurality of nucleic acid molecules selected from the group consisting of the nucleic acid molecules set forth in Table 7, Table 8, Table 9 and/or Table 10, their complements and hybridizing fragments thereof.

[0023] In one embodiment, the nucleic acid molecules of the present invention encode polypeptides having at least one transmembrane domain, GPI link, immunoreceptor tyrosine-based inhibitory motif ITIM), immunoreceptor tyrosine-based activatory motif (ITAM) and immunoreceptor tyrosine-based switch motif (ITSM), or a fragment thereof. In another embodiment, the nucleic acid molecules are produced synthetically. In still another embodiment, the nucleic acid molecules of the present invention are associated with a substrate e.g., in a predetermined region. In yet another embodiment, the substrate is selected from the group consisting of glass, plastic, or a filter. In a related embodiment, the nucleic acid molecules of the present invention are associated with the substrate by covalent bonding or by a linker.

[0024] In another embodiment, the substrate-associated nucleic acid molecules of the present invention hybridize with one or more nucleic acid molecules derived from a target sample. The target sample nucleic acid molecules may be labeled, e.g., fluorescently labeled. In still another embodiment, the target sample nucleic acid molecules of the present invention originate from a biological source selected from the group consisting of a cell, blood, plasma, lymph, urine, tissue, mucus, sputum and saliva. In a related embodiment, the biological source is derived from a cancerous tissue e.g., lung, colon, ovary, pancreas, prostate and breast tissues. In yet another embodiment, the target sample is obtained from a patient suffering from an autoimmune disorder.

[0025] In another aspect, the present invention provides methods of associating a plurality of molecules selected from the group consisting of nucleic acid molecules, protein molecules and fragments thereof comprising the steps of querying a sequence database for the presence of transmembrane molecules using a transmembrane protein topology prediction program to provide a transmembrane selection set; comparing homology of the molecules of the transmembrane selection set with array associated molecules; and excluding those molecules from the transmembrane selection set exhibiting substantial homology with one or more array associated molecules to provide a transmembrane signature set comprising a plurality of molecules.

[0026] In one embodiment, the methods of the present invention further comprise the steps of comparing the sequences of one or more molecules excluded from the transmembrane selection set with sequences of molecules set forth in an expression database; and excluding those compared molecules which are associated with substantial intensity values in the expression database to provide an expression signature set.

[0027] In another embodiment, the methods of the present invention further comprise the step of combining one or more of the molecules set forth in the transmembrane signature set with one or more of the molecules set forth in the expression signature set to provide a master transmembrane signature set.

[0028] In one embodiment, the transmembrane signature set, the expression signature set and the master transmembrane signature set comprise nucleic acid molecules. In another embodiment, the invention provides arrays comprising one or more transmembrane signature set nucleic acid molecules, their complement or hybridizing fragments thereof. In yet another embodiment, the invention provides arrays comprising one or more expression signature set nucleic acids molecules, their complement or hybridizing fragments thereof. In a further embodiment, inventor provides arrays comprising one or more master transmembrane signature set nucleic acid molecules, their complement or hybridizing fragments thereof.

[0029] In another aspect, the present invention provides methods of associating a plurality of molecules selected from the group consisting of nucleic acid molecules, protein molecules and fragments thereof comprising the steps of querying said sequence database for the presence of molecules exhibiting a GPI link, ITIM, ITAM or ITSM motif to provide a motif selection set comprising a plurality of molecules; comparing homology of the molecules of the motif selection set with said array associated molecules; and excluding those molecules from the motif selection set exhibiting substantial homology with one or more array associated molecules to provide a motif signature set comprising a plurality of molecules. In one embodiment, the methods further comprise combining at least one of the molecules from the motif signature set with at least one molecule from the master transmembrane signature set to provide a screening signature set comprising a plurality of molecules.

[0030] In one embodiment, the screening signature set molecules are nucleic acid molecules. In yet another embodiment, the invention provides arrays comprising one or more motif signature set nucleic acid molecules, their complements or hybridization fragments thereof. In another embodiment, the invention provides arrays comprising one or more screening signature set nucleic acid molecules, their complement or hybridization fragments thereof.

[0031] In another aspect, the invention pertains to methods of identifying a membrane associated molecule indicative of a hyperproliferative disease comprising contacting nucleic acid molecules derived from a target sample with an array of the present invention; detecting the nucleic acid molecules exhibiting an altered expression profile; and identifying at least one membrane associated molecule corresponding to the nucleic acid molecules having the altered expression profile.

[0032] The present invention also provides markers, e.g., marker proteins having altered expression profiles, where the markers, e.g., marker proteins, are identified in a target sample using an array of the invention. The present invention further provides antibodies or immunoreactive fragments thereof, which react with a marker protein of the invention.

### BRIEF DESCRIPTION OF THE DRAWINGS/FIGURES

[0033] FIG. 1 is a diagrammatic representation illustrating preferred methods of the present invention.

[0034] FIG. 2 shows a subset of genes identified from the custom chip as upregulated in colon cancer, evaluated by quantitative PCR (QPCR) as described in Example 4. FIG. 2 depicts the results for seven genes; SEQ ID NO:3446, SEQ ID NO:3447, SEQ ID NO:3448, SEQ ID NO:3449, SEQ BD NO:3450, SEQ ID NO:3451 and SEQ ID NO:3452.

### BRIEF DESCRIPTION OF THE INCORPORATED TABLES

[0035] Table 1 lists membrane associated molecules of the present invention which were isolated from the cellular membranes of tumors from human patients with colon cancer and were identified via quantitative PCR (QPCR). Table 2 describes exemplary fragments of the membrane associated molecules of Table 1 based on homologies to known domains and the amino acid sequence positions which define the approximate beginning and end of the domains. Table 3 provides portions of membrane associated molecules of Table 1 predicted to be part of the intracellular, extracellular or nontransmembrane regions. Table 4 shows all of the bases which code for an amino acid. Table 5 lists the SEQ ID NOs for the membrane associated molecule polynucleotides identified in Table 1. Table 6 lists each of the nucleotide SEQ ID NOs, corresponding amino acid SEQ ID NOs and corresponding probe SEQ ID NOs identified by the methods described herein. The nucleotide sequences of the genes identified by the methods described herein are set forth as SEQ ID NOs:1-1133. SEQ ID NOs:1134-1146 represent control sequences. One skilled in the art will appreciate the use of these sequences as positive and negative controls. The arrays of the invention may or may not include these control sequences. The amino acid sequences of the proteins corresponding to these genes are set forth as SEQ ID NOs:1147-2292. The probe sequences, set forth in SEQ ID NOs:2293-2438, correspond to a partial complement of the identified nucleotide sequences of the invention. In preferred embodiments, those skilled in the art will appreciate that these probes may be particularly useful for the preparation of arrays as described herein. In addition to providing a listing of sequences identified using the present invention, Table 6 further provides a summary of expression profiles for each of the membrane associated molecules in four different tumor types. More specifically, an “X” next to particular SEQ ID NOs. indicates that the identified molecule exhibits an altered expression profile in either colon, lung, pancreatic or ovarian tumors as compared to normal tissue. The designation represents measurements from a number of tumors in each specific proliferative disorder. One skilled in the art will appreciate that this differential expression is strongly indicative that the subject membrane associated molecule or associated nucleic acid molecule may provide a marker or target for the enumerated disorder.

[0036] Markers, e.g., marker proteins or marker nucleic acid molecules, which may be associated with cancer, can be identified using the methods of the present invention and arrays generated from some or all of the molecules comprising the motif signature set, transmembrane signature set, expression signature set, master transmembrane signature set or screening signature set. For example, custom arrays generated using a plurality of molecules from one of the aforementioned associations may be used to screen for molecules which are overexpressed in cancer, e.g., lung, colon, pancreatic and/or ovarian cancer. In exemplary embodiments of the present invention, specific membrane associated molecules (sometimes referred to herein as tumor associated molecules) have been identified which are associated with colon cancer, lung cancer, pancreatic cancer and ovarian cancer. Tables 7 through 10 are subsets of Table 6 and identify, respectively, those membrane associated molecules (by nucleotide SEQ ID NOs.) that exhibit altered expression profiles in colon tumors, lung tumors, pancreatic tumors and ovarian tumors. Put another way, Table 8 is a listing of each of those nucleotide SEQ ID NOs. which have an “X” in the column headed “colon” in Table 6. Similarly, Table 8 is representative of those SEQ ID NOs being designated as having an altered expression profile in colon tumors in Table 6. Tables 9 and 10 are the same for pancreatic and ovarian tumors respectively. It will be appreciated that the plurality of molecules associated in each of these subsets, or their complement or hybridizing fragments thereof, may be used to generate custom arrays useful in screening for particular indications. For example, an array could be generated using some or all of the molecules set forth in Table 7 that would be particularly useful in screening or diagnosing colon cancer.

[0037] More particularly, Tables 7-10 comprise membrane associated molecules which correlate to, or are indicative of, colon, lung, pancreatic or ovarian cancers. Using nonparametric methods, the molecules were analyzed according to expression rank (Exp) and intensity order (Order). In each case the malignant samples were compared to normal heart, liver, kidney, colon and lung. For the malignant samples, each molecule is significantly overexpressed compared to the number of normal tissue indicated in the table for the Exp and Order columns. In addition, the molecules were examined using global normalization techniques (Global). Again the malignant samples were compared with normal heart, liver, kidney, colon and lung. The table indicates the number of malignant samples which are overexpressed compared with 0, 1, 2, 3, 4 or 5 normal tissues.

### DETAILED DESCRIPTION OF THE INVENTION

### Definitions

[0038] So that the invention may be more readily understood, certain terms are first defined.

[0039] It is to be noted that the term “a” or “an” entity, refers to one or more of that entity; for example, “an immunoglobulin molecule,” is understood to represent one or more immunoglobulin molecules. As such, the terms “a” (or “an”), “one or more,” and “at least one” can be used interchangeably herein.

[0040] In the present invention, “isolated” refers to material removed from its native environment (e.g., the natural environment if it is naturally occurring), and thus is altered “by the hand of man” from its natural state. For example, an isolated polynucleotide could be part of a vector or a composition of matter, or could be contained within a cell, and still be “isolated” because that vector, composition of matter, or particular cell is not the original environment of the polynucleotide.

[0041] In the present invention, a “membrane protein” or “membrane polypeptide” is a polypeptide that is present in the membrane of cells through either direct or indirect association with the lipid bilayer, including, in particular, through prenylation of a carboxyl-terminal amino acid motif. Membrane proteins are amphipathic, meaning that the polypeptide has a hydrophobic and a hydrophilic region. Typically the hydrophobic regions interact with the lipid bilayer of the cell and the hydrophilic regions interact with the aqueous interior or exterior of the cell.

[0042] Certain membrane proteins are “transmembrane proteins” and have a extracellular domain, which interacts with the external cellular environment, an intracellular domain, which interacts with the internal cellular environment and a transmembrane domain which traverses the cellular lipid bilayer. Certain membrane proteins however do not have extracellular domains and interact with the lipid bilayer through covalently attached fatty acid groups, prenyl groups, oligosaccharides or through protein-protein interacts with other proteins in the cellular membrane. The addition of prenyl groups is known as prenylation and involves the covalent modification of a protein by the addition of either a farnesyl or geranylgeranyl isoprenoid. Prenylation occurs on a cysteine residue located near the carboxyl-terminus of a protein.

[0043] As used herein, a “polynucleotide” can contain the nucleotide sequence of the fall length cDNA sequence, including the untranslated 5′ and 3′ sequences, the coding sequences, as well as fragments, eptiopes, domains, and variants of the nucleic acid sequence. The polynucleotide can be composed of any polyribonucleotide or polydeoxyribonucleotide, which may be unmodified RNA or DNA or modified RNA or DNA. For example, polynucleotides can be composed of single- and double-stranded DNA, DNA that is a mixture of single- and double-stranded regions, single- and double-stranded RNA, and RNA that is mixture of single- and double-stranded regions, hybrid molecules comprising DNA and RNA that may be single-stranded or, more typically, double-stranded or a mixture of single- and double-stranded regions. In addition, the polynucleotides can be composed of triple-stranded regions comprising RNA or DNA or both RNA and DNA. polynucleotides may also contain one or more modified bases or DNA or RNA backbones modified for stability or for other reasons. “Modified” bases include, for example, tritylated bases and unusual bases such as inosine. A variety of modifications can be made to DNA and RNA; thus, “polynucleotide” embraces chemically, enzymatically, or metabolically modified forms.

[0044] In the present invention, a “polypeptide” can be composed of amino acids joined to each other by peptide bonds or modified peptide bonds, i.e., peptide isosteres, and may contain amino acids other than the 20 gene-encoded amino acids. The polypeptides of the present invention may be modified by either natural processes, such as posttranslational processing, or by chemical modification techniques which are well known in the art. Such modifications are well described in basic texts and in more detailed monographs, as well as in a voluminous research literature. Modifications can occur anywhere in the polypeptide, including the peptide backbone, the amino acid side-chains and the amino or carboxyl termini. It will be appreciated that the same type of modification may be present in the same or varying degrees at several sites in a given polypeptide. Also, a given polypeptide may contain many types of modifications. Polypeptides may be branched, for example, as a result of ubiquitination, and they may be cyclic, with or without branching. Cyclic, branched, and branched cyclic polypeptides may result from posttranslation natural processes or may be made by synthetic methods. Modifications include acetylation, acylation, ADP-ribosylation, amidation, covalent attachment of flavin, covalent attachment of a heme moiety, covalent attachment of a nucleotide or nucleotide derivative, covalent attachment of a lipid or lipid derivative, covalent attachment of phosphotidylinositol, cross-linking, cyclization, disulfide bond formation, demethylation, formation of covalent cross-links, formation of cysteine, formation of pyroglutamate, formylation, gamma-carboxylation, glycosylation, GPI anchor formation, hydroxylation, iodination, methylation, myristoylation, oxidation, pegylation, proteolytic processing, phosphorylation, prenylation, racemization, selenoylation, sulfation, transfer-RNA mediated addition of amino acids to proteins such as arginylation, and ubiquitination. (See, for instance, Proteins—Structure And Molecular Properties, 2nd Ed., T. E. Creighton, W.H. Freeman and Company, New York (1993); Posttranslational Covalent Modification of Proteins, B. C. Johnson, Ed., Academic Press, New York, pgs. 1-12 (1983); Seifter et al., Meth Enzymol 182:626-646 (1990); Rattan et al., Ann NY Acad Sci 663:48-62 (1992).)

[0045] In the present invention, a “polypeptide fragment” refers to a short amino acid sequence, for example, short amino acid sequences derived from the polypeptides derived from SEQ ID NOs:1288, 3446-3452 and 3458-3462. Protein fragments may be “free-standing,” or comprised within a larger polypeptide of which the fragment forms a part of region. Representative examples of polypeptide fragments of the invention, include, for example, fragments comprising about 5 amino acids, about 10 amino acids, about 15 amino acids, about 20 amino acids, about 30 amino acids, about 40 amino acids, about 50 amino acids, about 60 amino acids, about 70 amino acids, about 80 amino acids, about 90 amino acids, and about 100 amino acids in length.

[0046] As used herein, the term “array” represents an intentionally created collection of molecules which can be prepared either synthetically or biosynthetically. In particular, the term “array” as used herein means an intentionally created collection of peptides, proteins, oligonucleotides or polynucleotides attached to at least a first surface of at least one substrate wherein the identity of each molecule at a given predefined region is known.

[0047] As used herein, the term “oligonucleotide” as used herein refers to a nucleic acid molecule comprising from about 2 to about 300 nucleotides or more. Oligonucleotides for use in the present invention are preferably from 20-150 nucleotides in length, more preferably from 30-80 nucleotides in length.

[0048] As used herein, the term “solid support,” “support,” and “substrate” refer to a material or group of materials having a rigid or semi-rigid surface or surfaces. In many embodiments, at least one surface of the solid support will be substantially flat, although in some embodiments it may be desirable to create separate regions on the solid support, for example, wells, raised regions, pins, etched trenches, or the like. In one embodiment, the surface is glass, plastic (e.g., polypropylene, nylon), polyacrylamide or a filter, e.g., a nitrocellulose filter. According to other embodiments, the solid support(s) will take the form of beads, resins, gels, microspheres, fibers or other geometric configurations.

[0049] As used herein, the term “immobilization” refers to both noncovalent association, such as absorption, or covalent attachment, such as by way of a cross-linking agent.

[0050] A “marker” is a gene whose altered level of expression in a tissue or cell from its expression level in normal or healthy tissue or cell is associated with a disease state, such as cancer. A “marker nucleic acid” is a nucleic acid (e.g., mRNA, cDNA) encoded by or corresponding to a marker of the invention. For example, such marker nucleic acid molecules include DNA (e.g., cDNA) comprising the entire or a partial sequence of any of the nucleic acid sequences set forth in Tables 7-10 or the complement or hybridizing fragment of such a sequence. Marker nucleic acid molecules compatible with the instant invention also include RNA comprising the entire or a partial sequence of any of the nucleic acid sequences set forth in Tables 7-10 or the complement of such a sequence, wherein all thymidine residues are replaced with uridine residues. In one embodiment, a “marker” is a gene encoding a membrane associated protein, or a fragment thereof. For example, a “marker protein” is a protein encoded by or corresponding to a marker of the invention. Thus, exemplary marker proteins of the instant invention comprise the entire or a partial sequence of a protein encoded by any of the sequences set forth in Tables 7-10 or a fragment thereof. In one embodiment, a “marker protein” is a membrane associated protein or a fragment thereof. The terms “protein” and “polypeptide” are used interchangeably herein.

[0051] The term “probe” refers to any molecule which is capable of selectively binding to a specifically intended target molecule, for example, a nucleotide transcript or protein encoded by or corresponding to a marker. Probes can be either synthesized by one skilled in the art, or derived from appropriate biological preparations. For purposes of detection of the target molecule, probes may be specifically designed to be labeled, as described herein. Examples of molecules that can be utilized as probes include, but are not limited to, RNA, DNA, proteins, antibodies, and organic molecules.

[0052] The term “target nucleic acid” or “target sequence” refers to a nucleic acid or nucleic acid sequence which is to be analyzed. A target nucleotide can be a nucleic acid to which a probe will hybridize. The probe may or may not be specifically designed to hybridize to the target. It is either the presence or absence of the target nucleic acid that is to be detected, or the amount of the target nucleic acid that is to be quantified. The term target nucleic acid may refer to the specific subsequence of a larger nucleic acid to which the probe is directed or to the overall sequence (e.g., gene or mRNA) whose expression level it is desired to detect. The difference in usage will be apparent from context.

[0053] The term “hybridizing fragment,” as used herein, refers to a nucleic acid sequence which is capable of hybridizing to a target sequence.

[0054] The term “hybridization” refers to the process in which two single-stranded polynucleotides bind non-covalently to form a stable double-stranded polynucleotide; triple-stranded hybridization is also theoretically possible. The resulting (usually) double-stranded polynucleotide is a “hybrid.” The proportion of the population of polynucleotides that forms stable hybrids is referred to herein as the “degree of hybridization.” Hybrids can contain two DNA strands, two RNA strands, or one DNA and one RNA strand. In one embodiment, a hybridizing fragment hybridizes to a target sequence under stringent conditions. As used herein, the term “hybridizes under stringent conditions” is intended to describe conditions for hybridization and washing under which nucleotide sequences at least 60% (65%, 70%, 75%, 80%, 85%, 90%, preferably 95%) identical to each other typically remain hybridized to each other. Such stringent conditions are known to those skilled in the art and can be found in sections 6.3.1-6.3.6 of Current Protocols in Molecular Biology, John Wiley & Sons, N.Y. (1989). A non-limiting example of stringent hybridization conditions are hybridization in 6× sodium chloride/sodium citrate (SSC) at about 45 C, followed by one or more washes in 0.2×SSC, 0.1% SDS at 50-65 C. In a particularly preferred embodiment, stringent conditions comprise hybridization in 2×SDS (0.5 M NaPO4, 1% SDS, 2 mM EDTA, 2×SSC, 4×Denhardt's solution) at 42 C for 16-24 hrs, followed by one or more washes with 2×SSC with 0.2% SDS, 2×SSC or 0.2×SSC at 42 C.

[0055] The term “altered level of expression” of a marker refers to an expression level in a test sample e.g., a sample derived from a patient suffering from a hyperproliferative disease or disorder, that is greater or less than the standard error of the assay employed to assess expression, and is preferably at least twice, and more preferably three, four, five or ten times the expression level of the marker in a control sample (e.g., sample from a healthy subjects not having the associated disease) and preferably, the average expression level of the marker in several control samples. The “normal” level of expression of a marker is the level of expression of the marker in a control sample, e.g., a sample from a subject not afflicted with a hyperproliferative disease or disorder such as cancer e.g., lung, colon, pancreatic, and ovarian cancer and autoimmune diseases.

[0056] An “overexpression” or “significantly higher level of expression” of a marker refers to an expression level in a test sample that is greater than the standard error of the assay employed to assess expression, and is preferably at least twice, and more preferably three, four, five or ten times the expression level of the marker in a control sample (e.g., sample from a healthy subject not afflicted with a hyperproliferative disease or disorder) and preferably, the average expression level of the marker in several control samples.

[0057] A “significantly lower level of expression” of a marker refers to an expression level in a test sample that is at least twice, and more preferably three, four, five or ten times lower than the expression level of the marker in a control sample (e.g., sample from a healthy subject not afflicted with a hyperproliferative disease or disorder) and preferably, the average expression level of the marker in several control samples.

[0058] As used herein, “membrane associated molecules” include transmembrane protein molecules and GPI link, ITIM, ITAM, or ITSM motif containing protein molecules. Further, for the purposes of the instant application and as set forth by the context of use, nucleic acid molecules encoding such proteins or portions thereof may be referred to as membrane associated molecules. Some membrane associated molecules are integral membrane proteins, at least a portion of which reside and operate within a cell's plasma membrane, or within the membranes of a subcellular compartment or organelle. In selected embodiments, membrane associated molecules comprise at least one transmembrane domain (TM domain). As used herein, the term “transmembrane domain” includes an amino acid sequence of about 15 amino acid residues in length which spans the plasma membrane. More preferably, a transmembrane domain includes about at least 20, 25, 30, 35, 40, or 45 amino acid residues and spans the plasma membrane. Transmembrane domains are rich in hydrophobic residues, and typically have an alpha-helical structure. In one embodiment, at least 50%, 60%, 70%, 80%, 90%, 95% or more of the amino acids of a transmembrane domain are hydrophobic, e.g., leucines, isoleucines, tyrosines, or tryptophans. Transmembrane domains are described in, for example, Zagotta W. N. et al. (1996) Annual Rev. Neurosci. 19: 235-263, the contents of which are incorporated herein by reference.

[0059] In another embodiment, membrane associated molecules comprise at least one GPI link, ITIM, ITAM or ITSM motif. As used herein, the term “GPI link motif” refers to proteins associated with the outer leaflet of the plasma membrane via a glycosyl linkage to the inositol head group of lipid molecules known as glycosyl-phosphatidylinositol (GPI)-anchored proteins. Preferably the GPI link motif includes a core structure composed of ethanolamine phosphate in an amide linkage to the carboxy terminus of the molecule, three mannose residues, glucosamine and phosphatidylinositol. In other embodiments variations such as the addition of extra sugars or ethanolamine phosphates to the mannose residues; acetylation of the inositol ring, changes in the fatty acids (length, saturation, hydroxylation or the linkages to the glycerol backbone) may occur with the GPI link motif. GPI link motifs are described in, for example, Mayor S. et al. (2004) Nature Rev Mol Cell Biol 5(2); 110-120, the contents of which are incorporated here. As used here, the term “ITIM motif” is characterized as an immunoreceptor tyrosine-based inhibitory motif. More preferably, ITIM motifs contain the sequence [I/V]XYXXL. As used here, the term “ITAM motif” is characterized as an immunoreceptor tyrosine-based activation motif. More preferably, ITAM motifs contain the sequence YXX[L/V]X₇₋₁₁YX[L/V]. As used here, the “ITSM motif” is characterized as an immunoreceptor tyrosine-based switch motif. More preferably, ITSM motifs contain the sequence [S/T]XTXXX[V/I]. ITIM, ITAM and ITSM motifs are described in, for example, Sidorenko S. et al. (2003) Nature Immunology 4(1):19-24, the contents of which are incorporated herein by reference.

[0060] As used herein, the term “transmembrane selection set” refers to a subset of sequences identified in a sequence database utilizing a model for membrane protein topology prediction. In one embodiment, the sequence database is the Ensemble™ database. In another embodiment, the model of membrane topology prediction is the Transmembrane Hidden Markov Model (TMHMM).

[0061] As used herein, the term “transmembrane signature set” refers to a subset of sequences identified by comparing the transmembrane selection set of molecules against a commercially available array and excluding those molecules having substantial homology to the molecules associated with the arrays.

[0062] The term “commercially available array” shall be held to mean any one of a number of arrays sold on the open market and used to screen samples for gene expression levels. Non-limiting examples of commercial arrays include Affymetrix Human Genome Focus Array, Affymetrix Human Genome U133 Plus 2.0, Affymetrix Human Genome U133 set, Affymetrix Human Genome U133A 2.0, Affymetrix Human GenomeU95 set, Affymetrix HuGeneFL Genome, Affymetrix Human X3P, Human Cancer G110, Human Genome U95 B-E, Amersham CodeLink™ Human Whole Genome 55K, Amersham CodeLink Uniset™ Human 20K, Amersham CodeLink Uniset™ Human 10K, Agilent Whole Genome, Agilent Human 1A 9 (V2), Agilent Human 1B, MWG Human 40K (A/B), MWG Human 30K (A/B/C), MWG Human Cancer and MWG Human Inflammation expression arrays. Molecules on the surface of such arrays or chips shall be termed “array associated molecules” for the purposes of the instant application. It will be appreciated that those skilled in the art can readily identify and include comparable arrays based on the foregoing exemplary list.

[0063] As used herein, the term “expression signature set” refers to a subset of sequences identified by comparing the molecules examined from the transmembrane selection set during identification of the transmembrane signature set against an expression database and excluding those molecules having a substantial intensity value in the expression database. A non-limiting example of an expression database includes the Genelogic™ expression database.

[0064] As used herein, the term “master transmembrane signature set” refers to the combination of the sequences contained within the transmembrane signature set and the expression signature set.

[0065] As used herein, the term, “motif selection set” refers to a subset of sequences identified by screening a publicly available sequence database of molecules for the presence of a sequence motif. Exemplary sequence motifs include GPI link, ITIM, ITAM and ITSM motifs.

[0066] As used herein, the term “motif signature set” refers to a subset of sequences identified by comparing the motif selection set of molecules against a commercial array and excluding those molecules having a substantial homology to sequences associated with the array. Non-limiting examples of commercial arrays are enumerated above.

[0067] As used herein, the term “motif” refers to certain sequence patterns known to code for regions of proteins having specific biological characteristics such as signal sequences, DNA binding domains, or transmembrane domains. Exemplary sequence motifs include GPI link, immunoreceptor tyrosine-based inhibitory motif (ITIM), immunoreceptor tyrosine-based activatory motif (ITAM) and immunoreceptor tyrosine-based switch motif (ITSM).

[0068] As used herein, the term “screening signature set” refers to the combination of the sequences contained within the master transmembrane signature set and the motif signature set.

[0069] As used herein, the term “substantial intensity value” refers to an intensity value for a membrane-associated molecule which is present in greater than about 5% of patient samples in 5 or more sample sets. In one embodiment, the patient sample and sample set information are derived from the Gene Logic™ cancer suite database.

[0070] As used herein, the term “sample set” refers to groups of expression data derived from patients by tissue and disease state. Examples of sample sets includes, but is not limited to: Tumor Breast, Normal Breast, Tumor Cervix, Normal Cervix, Tumor Colon, Normal Colon, Tumor Duodenum, Normal Duodenum, Tumor Endometrium, Normal Endometrium, Tumor Esophagus, Normal Esophagus, Tumor Kidney, Normal Kidney, Tumor Liver, Normal Liver, Tumor Lung, Normal Lung, Tumor Lymph Node, Normal Lymph Node, Tumor Ovary, Normal Ovary, Tumor Pancreas, Normal Pancreas, Tumor Prostate, Normal Prostate, Tumor Rectum, Normal Rectum, Tumor Spleen, Normal Spleen, Tumor Stomach, Normal Stomach, Tumor Testis, Normal Testis, Normal Bladder, Normal Bones, Normal Brain, Normal Left Ventricle, Normal Muscles, Normal Myometrium, Normal Skin, Normal Small intestine, Normal Thymus, Normal White Blood Cell. The sample set information was derived from the Gene Logic cancer suite database.

[0071] The term “nucleotide sequence” is intended to include DNA sequences (e.g., cDNA or genomic DNA sequences) and RNA sequences (e.g., mRNA sequences). The nucleotide sequence is an art-recognized means for describing a nucleic acid molecule, defined herein, for which the nucleobase sequence has been determined. A nucleotide sequence is preferably depicted as a single strand of nucleobases (e.g., including the bases A, T, C, or G for DNA nucleotide sequences and including the bases A, U, C, or G for RNA sequences) and is written in a 5′ to 3′ orientation. However, a DNA sequence may also be depicted as a double strand of complementary nucleobases. Moreover, one of skill in the art can readily determine the sequence of a complementary strand of nucleotide sequence (e.g., a 3′ to 5′ strand) given, for example, a 5′ to 3′ strand of bases.

[0072] As used herein, a “naturally-occurring” nucleic acid molecule refers to an RNA or DNA molecule having a nucleotide sequence that occurs in nature (e.g., encodes a natural protein).

[0073] As used herein, the term “coding region” refers to regions of a nucleotide sequence comprising codons which are translated into amino acid residues, whereas the term “noncoding region” refers to regions of a nucleotide sequence that are not translated into amino acids (e.g., 5′ and 3′ untranslated regions).

[0074] As used herein, the term “promoter/regulatory sequence” means a nucleic acid sequence which is required for expression of a gene product operably linked to the promoter/regulatory sequence. In some instances, this sequence may be the core promoter sequence and in other instances, this sequence may also include an enhancer sequence and other regulatory elements which are required for expression of the gene product. The promoter/regulatory sequence may, for example, be one which expresses the gene product in a tissue-specific manner.

[0075] A “constitutive” promoter is a nucleotide sequence which, when operably linked with a polynucleotide which encodes or specifies a gene product, causes the gene product to be produced in a living human cell under most or all physiological conditions of the cell.

[0076] An “inducible” promoter is a nucleotide sequence which, when operably linked with a polynucleotide which encodes or specifies a gene product, causes the gene product to be produced in a living human cell substantially only when an inducer which corresponds to the promoter is present in the cell.

[0077] A “tissue-specific” promoter is a nucleotide sequence which, when operably linked with a polynucleotide which encodes or specifies a gene product, causes the gene product to be produced in a living human cell substantially only if the cell is a cell of the tissue type corresponding to the promoter.

[0078] A “transcribed polynucleotide” or “nucleotide transcript” is a polynucleotide (e.g. an mRNA, hnRNA, a cDNA, or an analog of such RNA or cDNA) which is complementary to or homologous with all or a portion of a mature mRNA made by transcription of a marker of the invention and normal post-transcriptional processing (e.g. splicing), if any, of the RNA transcript, and reverse transcription of the RNA transcript.

[0079] “Complementary” or “complement” refers to the broad concept of sequence complementarity between regions of two nucleic acid strands or between two regions of the same nucleic acid strand. It is known that an adenine residue of a first nucleic acid region is capable of forming specific hydrogen bonds (“base pairing”) with a residue of a second nucleic acid region which is antiparallel to the first region if the residue is thymine or uracil. Similarly, it is known that a cytosine residue of a first nucleic acid strand is capable of base pairing with a residue of a second nucleic acid strand which is antiparallel to the first strand if the residue is guanine. A first region of a nucleic acid is complementary to a second region of the same or a different nucleic acid if, when the two regions are arranged in an antiparallel fashion, at least one nucleotide residue of the first region is capable of base pairing with a residue of the second region. Preferably, the first region comprises a first portion and the second region comprises a second portion, whereby, when the first and second portions are arranged in an antiparallel fashion, at least about 50%, and preferably at least about 75%, at least about 90%, or at least about 95% of the nucleotide residues of the first portion are capable of base pairing with nucleotide residues in the second portion. More preferably, all nucleotide residues of the first portion are capable of base pairing with nucleotide residues in the second portion.

[0080] The term “homology” refers to sequence similarity between two polynucleotide sequences or between two polypeptide sequences. The phrases “percent homology” and “% homology” refer to the percentage of sequence similarity found in a comparison of two or more polynucleotide sequences or two or more polypeptide sequences. “Sequence similarity” refers to the percent similarity in base pair sequence (as determined by any suitable method) between two or more polynucleotide sequences. Two or more sequences can be anywhere from 0-100% similar, or any integer value there between. Similarity can be determined by comparing a position in each sequence that may be aligned for purposes of comparison. When a position in the compared sequence is occupied by the same nucleotide base or amino acid, then the molecules are identical at that position. A degree of homology or similarity of polypeptide sequences is a function of the number of amino acids at positions shared by the polypeptide sequences. The term “substantial homology,” as used herein, refers to homology of at least 50%, more preferably, 60%, 70%, 80%, 90%, 95%, 99% or more.

[0081] A molecule is “fixed” or “affixed” to a substrate if it is covalently or non-covalently associated with the substrate such the substrate can be rinsed with a fluid (e.g. standard saline citrate, pH 7.4) without a substantial fraction of the molecule dissociating from the substrate.

[0082] A disease or disorder is “inhibited” if at least one symptom of the disease or disorder is alleviated, terminated, slowed, or prevented. As used herein, a disease or disorder such as, for example, cancer is “inhibited” if recurrence or metastasis of the cancer is reduced, slowed, delayed, or prevented.

[0083] A kit is any manufacture (e.g., a package or container) comprising at least one reagent, e.g., a probe, for specifically detecting the expression of a marker of the invention. The kit may be promoted, distributed, or sold as a unit for performing the methods of the present invention.

[0084] Binding molecules. The methods of treating hyperproliferative disorders as described herein utilize “binding molecules.” A binding molecule comprises, consists essentially of, or consists of at least one binding domain which, either alone or in combination with one or more additional binding domains, specifically binds to a target gene product (such as a protein, an antigen or other binding partner), e.g., a lung, colon, pancreatic and/or ovarian cancer tumor-associated polypeptide or fragment or variant thereof. For example, in various embodiments, a binding molecule comprises one or more immunoglobulin antigen binding domains, one or more binding domains of a receptor molecule which, either alone or together, specifically bind a ligand, or one or more binding domains of a ligand molecule which, either alone or together, specifically bind a receptor. In certain embodiments, a binding molecule comprises, consists essentially of, or consists of at least two binding domains, for example, two, three, four, five, six, or more binding domains. Each binding domain may bind to a target molecule separately, or two or more binding domains may be required to bind to a given target, for example, a combination of an immunoglobulin heavy chain and an immunoglobulin light chain.

[0085] Binding molecules, e.g., binding polypeptides, e.g., lung, colon, pancreatic and/or ovarian cancer tumor-associated polypeptide-specific antibodies used in the diagnostic and treatment methods disclosed herein may comprise, consist essentially of, or consist of two or more subunits thus forming multimers, e.g., dimers, trimers or tetramers. For example, certain binding molecules comprise a polypeptide dimer, typically, a heterodimer comprising two non-identical monomeric subunits. Other binding molecules comprise tetramers, which can include two pairs of homodimers, e.g., two identical monomeric subunits, e.g., an antibody molecule consisting of two identical heavy chains and two identical light chains.

[0086] Certain binding molecules, e.g., binding polypeptides to be utilized in the diagnostic and treatment methods disclosed herein comprise at least one amino acid sequence derived from an immunoglobulin. A polypeptide or amino acid sequence “derived from” a designated protein refers to the origin of the polypeptide. In certain cases, the polypeptide or amino acid sequence which is derived from a particular starting polypeptide or amino acid sequence has an amino acid sequence that is essentially identical to that of the starting sequence, or a portion thereof, wherein the portion consists of at least 10-20 amino acids, preferably at least 20-30 amino acids, more preferably at least 30-50 amino acids, or which is otherwise identifiable to one of ordinary skill in the art as having its origin in the starting sequence. Alternatively, a polypeptide or amino acid sequence derived from a designated protein may be similar, e.g., have a certain percent identity to the starting sequence, e.g., it may be 60%, 70%, 75%, 80%, 85%, 90%, or 95% identical to the starting sequence, as described in more detail below.

[0087] Preferred binding polypeptides comprise, consist essentially of, or consist of an amino acid sequence derived from a human amino acid sequence. However, binding polypeptides may comprise one or more contiguous amino acids derived from another mammalian species. For example, a primate heavy chain portion, hinge portion, or binding site may be included in the subject binding polypeptides. Alternatively, one or more murine-derived amino acids may be present in a non-murine binding polypeptide, e.g., in an antigen binding site of a binding molecule. In therapeutic applications, preferred binding molecules to be used in the methods of the invention are not immunogenic in the animal to which the binding polypeptide is administered.

[0088] It will also be understood by one of ordinary skill in the art that the binding polypeptides for use in the diagnostic and treatment methods disclosed herein may be modified such that they vary in amino acid sequence from the naturally occurring binding polypeptide from which they were derived. For example, nucleotide or amino acid substitutions leading to conservative substitutions or changes at “non-essential” amino acid residues may be made.

[0089] In certain embodiments, a binding polypeptide for use in the methods of the invention comprises an amino acid sequence or one or more moieties not normally associated with that binding polypeptide. Exemplary modifications are described in more detail below. For example, a binding polypeptide of the invention may comprise a flexible linker sequence, or may be modified to add a functional moiety (e.g., PEG, a drug, a toxin, or a label).

[0090] A binding polypeptide for use in the methods of the invention may comprise, consist essentially of, or consist of a fusion protein. Fusion proteins are chimeric molecules which comprise a binding domain with at least one target binding site, and at least one heterologous portion.

[0091] A “chimeric” protein comprises a first amino acid sequence linked to a second amino acid sequence with which it is not naturally linked in nature. The amino acid sequences may normally exist in separate proteins that are brought together in the fusion polypeptide or they may normally exist in the same protein but are placed in a new arrangement in the fusion polypeptide. A chimeric protein may be created, for example, by chemical synthesis, or by creating and translating a polynucleotide in which the peptide regions are encoded in the desired relationship.

[0092] The term “heterologous” as applied to a polynucleotide or a polypeptide, means that the polynucleotide or polypeptide is derived from a genotypically distinct entity from that of the rest of the entity to which it is being compared. For instance, a heterologous antigen may be derived from a different species origin, different cell type, or the same type of cell of distinct individuals.

[0093] The term “ligand binding domain” or “ligand binding portion” as used herein refers to any native receptor (e.g., cell surface receptor) or any region or derivative thereof retaining at least a qualitative ligand binding ability, and preferably the biological activity of a corresponding native receptor.

[0094] The term “receptor binding domain” or “receptor binding portion” as used herein refers to any native ligand or any region or derivative thereof retaining at least a qualitative receptor binding ability, and preferably the biological activity of a corresponding native ligand.

[0095] Antibody or Immunoglobulin. In one embodiment, the binding molecules for use in the diagnostic and treatment methods disclosed herein are “antibody” or “immunoglobulin” molecules, or immunospecific fragments thereof, e.g., naturally occurring antibody or immunoglobulin molecules or engineered antibody molecules or fragments that bind antigen in a manner similar to antibody molecules. The terms “antibody” and “immunoglobulin” are used interchangeably herein. An antibody or immunoglobulin comprises at least the variable domain of a heavy chain, and normally comprises at least the variable domains of a heavy chain and a light chain. Basic immunoglobulin structures in vertebrate systems are relatively well understood. See, e.g., Harlow et al., Antibodies: A Laboratory Manual, (Cold Spring Harbor Laboratory Press, 2nd ed. 1988).

[0096] As will be discussed in more detail below, the term “immunoglobulin” comprises five broad classes of polypeptides that can be distinguished biochemically. All five classes are clearly within the scope of the present invention, the following discussion will generally be directed to the IgG class of immunoglobulin molecules. With regard to IgG, a standard immunoglobulin molecule comprises two identical light chain polypeptides of molecular weight approximately 23,000 Daltons, and two identical heavy chain polypeptides of molecular weight 53,000-70,000. The four chains are typically joined by disulfide bonds in a “Y” configuration wherein the light chains bracket the heavy chains starting at the mouth of the “Y” and continuing through the variable region.

[0097] Both the light and heavy chains are divided into regions of structural and functional homology. The terms “constant” and “variable” are used functionally. In this regard, it will be appreciated that the variable domains of both the light (V_{L}) and heavy (V_{H}) chain portions determine antigen recognition and specificity. Conversely, the constant domains of the light chain (C_{L}) and the heavy chain (C_{H}1, C_{H}2 or C_{H}3) confer important biological properties such as secretion, transplacental mobility, Fc receptor binding, complement binding, and the like. By convention the numbering of the constant region domains increases as they become more distal from the antigen binding site or amino-terminus of the antibody. The N-terminal portion is a variable region and at the C-terminal portion is a constant region; the C_{H}3 and C_{L} domains actually comprise the carboxy-terminus of the heavy and light chain, respectively.

[0098] Light chains are classified as either kappa or lambda (κ, λ). Each heavy chain class may be bound with either a kappa or lambda light chain. In general, the light and heavy chains are covalently bonded to each other, and the “tail” portions of the two heavy chains are bonded to each other by covalent disulfide linkages or non-covalent linkages when the immunoglobulins are generated either by hybridomas, B cells or genetically engineered host cells. In the heavy chain, the amino acid sequences run from an N-terminus at the forked ends of the Y configuration to the C-terminus at the bottom of each chain. Those skilled in the art will appreciate that heavy chains are classified as gamma, mu, alpha, delta, or epsilon, (γ, μ, α, δ, ε) with some subclasses among them (e.g., γ1-γ4). It is the nature of this chain that determines the “class” of the antibody as IgG, IgM, IgA IgG, or IgE, respectively. The immunoglobulin subclasses (isotypes) e.g., IgG₁, IgG₂, IgG₃, IgG₄, IgA₁, etc. are well characterized and are known to confer functional specialization. Modified versions of each of these classes and isotypes are readily discernable to the skilled artisan in view of the instant disclosure and, accordingly, are within the scope of the instant invention.

[0099] As indicated above, the variable region allows the antibody to selectively recognize and specifically bind epitopes on antigens. That is, the V_{L} domain and V_{H} domain of an antibody combine to form the variable region that defines a three dimensional antigen binding site. This quaternary antibody structure forms the antigen binding site present at the end of each arm of the Y. More specifically, the antigen binding site is defined by three complementary determining regions (CDRs) on each of the V_{H} and V_{L} chains. In some instances, e.g., certain immunoglobulin molecules derived from camelid species or engineered based on camelid immunoglobulins, a complete immunoglobulin molecule may consist of heavy chains only, with no light chains. See, e.g., Hamers-Casterman et al., Nature 363:446-448 (1993).

[0100] In naturally occurring antibodies, the six “complementarity determining regions” or “CDRs” present in each antigen binding domain are short, non-contiguous sequences of amino acids that are specifically positioned to form the antigen binding domain as the antibody assumes its three dimensional configuration in an aqueous environment. The remainder of the amino acids in the antigen binding domains, referred to as “framework” regions, show less inter-molecular variability. The framework regions largely adopt a β-sheet conformation and the CDRs form loops which connect, and in some cases form part of, the β-sheet structure. Thus, framework regions act to form a scaffold that provides for positioning the CDRs in correct orientation by inter-chain, non-covalent interactions. The antigen binding domain formed by the positioned CDRs defines a surface complementary to the epitope on the immunoreactive antigen. This complementary surface promotes the non-covalent binding of the antibody to its cognate epitope. The amino acids comprising the CDRs and the framework regions, respectively, can be readily identified for any given heavy or light chain variable region by one of ordinary skill in the art, since they have been precisely defined (see, “Sequences of Proteins of Immunological Interest,” Kabat, E., et al., U.S. Department of Health and Human Services, (1983); and Chothia and Lesk, J. Mol. Biol., 196:901-917 (1987), which are incorporated herein by reference in their entireties).

[0101] In camelid species, however, the heavy chain variable region, referred to as V_{H}H, forms the entire CDR. The main differences between camelid V_{H}H variable regions and those derived from conventional antibodies (V_{H}) include (a) more hydrophobic amino acids in the light chain contact surface of V_{H} as compared to the corresponding region in V_{H}H, (b) a longer CDR3 in V_{H}H, and (c) the frequent occurrence of a disulfide bond between CDR1 and CDR3 in V_{H}H.

[0102] In one embodiment, an antigen binding molecule of the invention comprises at least one heavy or light chain CDR of an antibody molecule. In another embodiment, an antigen binding molecule of the invention comprises at least two CDRs from one or more antibody molecules. In another embodiment, an antigen binding molecule of the invention comprises at least three CDRs from one or more antibody molecules. In another embodiment, an antigen binding molecule of the invention comprises at least four CDRs from one or more antibody molecules. In another embodiment, an antigen binding molecule of the invention comprises at least five CDRs from one or more antibody molecules. In another embodiment, an antigen binding molecule of the invention comprises at least six CDRs from one or more antibody molecules. Exemplary antibody molecules comprising at least one CDR that can be included in the subject antigen binding molecules are known in the art and exemplary molecules are described herein.

[0103] Antibodies or immunospecific fragments thereof for use in the methods of the invention include, but are not limited to, polyclonal, monoclonal, multispecific, human, humanized, primatized, or chimeric antibodies, single chain antibodies, epitope-binding fragments, e.g., Fab, Fab′ and F(ab′)₂, Fd, Fvs, single-chain Fvs (scFv), single-chain antibodies, disulfide-linked Fvs (sdFv), fragments comprising either a V_{L} or V_{H} domain, fragments produced by a Fab expression library, and anti-idiotypic (anti-Id) antibodies (including, e.g., anti-Id antibodies to binding molecules disclosed herein). ScFv molecules are known in the art and are described, e.g., in U.S. Pat. No. 5,892,019. Immunoglobulin or antibody molecules of the invention can be of any type (e.g., IgG, IgE, IgM, IgD, IgA, and IgY), class (e.g., IgG1, IgG2, IgG3, IgG4, IgA1 and IgA2) or subclass of immunoglobulin molecule.

[0104] Antibody fragments, including single-chain antibodies, may comprise the variable region(s) alone or in combination with the entirety or a portion of the following: hinge region, C_{H}1, C_{H}2, and C_{H}3 domains. Also included in the invention are antigen-binding fragments also comprising any combination of variable region(s) with a hinge region, C_{H}1, C_{H}2, and C_{H}3 domains. Antibodies or immunospecific fragments thereof for use in the diagnostic and therapeutic methods disclosed herein may be from any animal origin including birds and mammals. Preferably, the antibodies are human, murine, donkey, rabbit, goat, guinea pig, camel, llama, horse, or chicken antibodies. In another embodiment, the variable region may be condricthoid in origin (e.g., from sharks). As used herein, “human” antibodies include antibodies having the amino acid sequence of a human immunoglobulin and include antibodies isolated from human immunoglobulin libraries or from animals transgenic for one or more human immunoglobulins and that do not express endogenous immunoglobulins, as described infra and, for example in, U.S. Pat. No. 5,939,598 by Kucherlapati et al.

[0105] As used herein, the term “heavy chain portion” includes amino acid sequences derived from an immunoglobulin heavy chain. A polypeptide comprising a heavy chain portion comprises at least one of: a C_{H}1 domain, a hinge (e.g., upper, middle, and/or lower hinge region) domain, a C_{H}2 domain, a C_{H}3 domain, or a variant or fragment thereof. For example, a binding polypeptide for use in the invention may comprise a polypeptide chain comprising a C_{H}1 domain; a polypeptide chain comprising a C_{H}1 domain, at least a portion of a hinge domain, and a C_{H}2 domain; a polypeptide chain comprising a C_{H}1 domain and a C_{H}3 domain; a polypeptide chain comprising a C_{H}1 domain, at least a portion of a hinge domain, and a C_{H}3 domain, or a polypeptide chain comprising a C_{H}1 domain, at least a portion of a hinge domain, a C_{H}2 domain, and a C_{H}3 domain. In another embodiment, a polypeptide of the invention comprises a polypeptide chain comprising a C_{H}3 domain. Further, a binding polypeptide for use in the invention may lack at least a portion of a C_{H}2 domain (e.g., all or part of a C_{H}2 domain). As set forth above, it will be understood by one of ordinary skill in the art that these domains (e.g., the heavy chain portions) may be modified such that they vary in amino acid sequence from the naturally occurring immunoglobulin molecule.

[0106] In certain binding molecules, e.g., binding polypeptides, e.g., lung, colon, pancreatic and/or ovarian cancer tumor-associated polypeptide-specific antibodies or immunospecific fragments thereof for use in the diagnostic and treatment methods disclosed herein, the heavy chain portions of one polypeptide chain of a multimer are identical to those on a second polypeptide chain of the multimer. Alternatively, heavy chain portion-containing monomers for use in the methods of the invention are not identical. For example, each monomer may comprise a different target binding site, forming, for example, a bispecific antibody.

[0107] The heavy chain portions of a binding polypeptide for use in the diagnostic and treatment methods disclosed herein may be derived from different immunoglobulin molecules. For example, a heavy chain portion of a polypeptide may comprise a C_{H}1 domain derived from an IgG1 molecule and a hinge region derived from an IgG3 molecule. In another example, a heavy chain portion can comprise a hinge region derived, in part, from an IgG1 molecule and, in part, from an IgG3 molecule. In another example, a heavy chain portion can comprise a chimeric hinge derived, in part, from an IgG1 molecule and, in part, from an IgG4 molecule.

[0108] As used herein, the term “light chain portion” includes amino acid sequences derived from an immunoglobulin light chain. Preferably, the light chain portion comprises at least one of a V_{L} or C_{L} domain.

[0109] An isolated nucleic acid molecule encoding a non-natural variant of a polypeptide derived from an immunoglobulin (e.g., an immunoglobulin heavy chain portion or light chain portion) can be created by introducing one or more nucleotide substitutions, additions or deletions into the nucleotide sequence of the immunoglobulin such that one or more amino acid substitutions, additions or deletions are introduced into the encoded protein. Mutations may be introduced by standard techniques, such as site-directed mutagenesis and PCR-mediated mutagenesis. Preferably, conservative amino acid substitutions are made at one or more non-essential amino acid residues.

[0110] A “conservative amino acid substitution” is one in which the amino acid residue is replaced with an amino acid residue having a similar side chain. Families of amino acid residues having similar side chains have been defined in the art, including basic side chains (e.g., lysine, arginine, histidine), acidic side chains (e.g., aspartic acid, glutamic acid), uncharged polar side chains (e.g., glycine, asparagine, glutamine, serine, threonine, tyrosine, cysteine), nonpolar side chains (e.g., alanine, valine, leucine, isoleucine, proline, phenylalanine, methionine, tryptophan), beta-branched side chains (e.g., threonine, valine, isoleucine) and aromatic side chains (e.g., tyrosine, phenylalanine, tryptophan, histidine). Thus, a nonessential amino acid residue in an immunoglobulin polypeptide is preferably replaced with another amino acid residue from the same side chain family. In another embodiment, a string of amino acids can be replaced with a structurally similar string that differs in order and/or composition of side chain family members.

[0111] Alternatively, in another embodiment, mutations may be introduced randomly along all or part of the immunoglobulin coding sequence, such as by saturation mutagenesis, and the resultant mutants can be incorporated into binding molecules for use in the diagnostic and treatment methods disclosed herein and screened for their ability to bind to the desired antigen, e.g., lung, colon, pancreatic and/or ovarian cancer tumor-associated polypeptides and variants of fragments thereof.

[0112] Antibodies or fragment thereof for use in the diagnostic and therapeutic methods disclosed herein may be described or specified in terms of the epitope(s) or portion(s) of a target polypeptide that they recognize or specifically bind. The portion of an antigen which specifically interacts with the antigen binding domain of an antibody is an “epitope,” or an “antigenic determinant.” An antigen may comprise a single epitope, but typically, an antigen comprises at least two epitopes, and can include any number of epitopes, depending on the size, conformation, and type of antigen. Antigens are typically peptides or polypeptides, but can be any molecule or compound or a combination of molecules or compounds. For example, an organic compound, e.g., dinitrophenol or DNP, a nucleic acid, a carbohydrate, or a mixture of any of these compounds either with or without a peptide or polypeptide can be a suitable antigen. Thus, for example, an “epitope” on a polypeptide may include a carbohydrate side chain.

[0113] The minimum size of a peptide or polypeptide epitope is thought to be about four to five amino acids. Peptide or polypeptide epitopes preferably contain at least seven, more preferably at least nine and most preferably between at least about 15 to about 30 amino acids. Since a CDR can recognize an antigenic peptide or polypeptide in its tertiary form, the amino acids comprising an epitope need not be contiguous, and in some cases, may not even be on the same peptide chain. In the present invention, peptide or polypeptide antigens preferably contain a sequence of at least 4, at least 5, at least 6, at least 7, more preferably at least 8, at least 9, at least 10, at least 15, at least 20, at least 25, and, most preferably, between about 15 to about 30 amino acids. Preferred peptides or polypeptides comprising, or alternatively consisting of, antigenic epitopes are at least 10, 15, 20, 25, 30, 35, 40, 45, 50, 55, 60, 65, 70, 75, 80, 85, 90, 95, or 100 amino acid residues in length.

[0114] By “specifically binds,” it is generally meant that an antibody binds to an epitope via its CDR, and that the binding entails some complementarity between the CDR and the epitope. According to this definition, an antibody is said to “specifically bind” to an epitope when it binds to that epitope, via its CDR more readily than it would bind to a random, unrelated epitope. The term “specificity” is used herein to qualify the relative affinity by which a certain antibody binds to a certain epitope. For example, antibody “A” may be deemed to have a higher specificity for a given epitope than antibody “B,” or antibody “A” may be said to bind to epitope “C” with a higher specificity than it has for related epitope “D.”

[0115] By “preferentially binds,” it is meant that the antibody specifically binds to an epitope more readily than it would bind to a related, similar, homologous, or analogous epitope. Thus, an antibody which “preferentially binds” to a given epitope would more likely bind to that epitope than to a related epitope, even though such an antibody may cross-react with the related epitope.

[0116] By way of non-limiting example, an antibody may be considered to bind a first epitope preferentially if it binds said first epitope with a dissociation constant (K_{D}) that is less than the antibody's K_{D} for the second epitope. In another non-limiting example, an antibody may be considered to bind a first antigen preferentially if it binds the first epitope with an affinity that is at least one order of magnitude less than the antibody's K_{D} for the second epitope. In another non-limiting example, an antibody may be considered to bind a first epitope preferentially if it binds the first epitope with an affinity that is at least two orders of magnitude less than the antibody's K_{D} for the second epitope.

[0117] In another non-limiting example, an antibody may be considered to bind a first epitope preferentially if it binds the first epitope with an off rate (k(off)) that is less than the antibody's k(off) for the second epitope. In another non-limiting example, an antibody may be considered to bind a first epitope preferentially if it binds the first epitope with an affinity that is at least one order of magnitude less than the antibody's k(off) for the second epitope. In another non-limiting example, an antibody may be considered to bind a first epitope preferentially if it binds the first epitope with an affinity that is at least two orders of magnitude less than the antibody's k(off) for the second epitope.

[0118] An antibody for use in the diagnostic and treatment methods disclosed herein may be said to bind a target polypeptide disclosed herein or a fragment or variant thereof with an off rate (k(off)) of less than or equal to 5×10⁻² sec⁻¹, 10⁻² sec⁻¹, 5×10⁻³ sec⁻¹ or 10⁻³ sec⁻¹. More preferably, an antibody of the invention may be said to bind a target polypeptide disclosed herein or a fragment or variant thereof with an off rate (k(off)) less than or equal to 5×10⁻⁴ sec⁻¹, 10⁻⁴ sec⁻¹, 5×10⁻⁵ sec⁻¹, or 10⁻⁵ sec⁻¹, 5×10⁻⁶ sec⁻¹, 10⁻⁶ sec⁻¹, 5×10⁻⁷ sec⁻¹ or 10⁻⁷ sec⁻¹

[0119] An antibody or fragment thereof for use in the diagnostic and treatment methods disclosed herein may be said to bind a target polypeptide disclosed herein or a fragment or variant thereof with an on rate (k(on)) of greater than or equal to 10³ M−1 sec−1, 5×10³ M−1 sec−1, 10⁴ M−1 sec−1 or 5×10⁴ M−1 sec−1. More preferably, an antibody of the invention may be said to bind a target polypeptide disclosed herein or a fragment or variant thereof with an on rate (k(on)) greater than or equal to 10⁵ M−1 sec−1, 5×10⁵ M−1 sec−1, 10⁶ M−1 sec−1, or 5×10⁶M−1 sec−1 or 10⁷M−1 sec−1.

[0120] An antibody is said to competitively inhibit binding of a reference antibody to a given epitope if it preferentially binds to that epitope to the extent that it blocks, to some degree, binding of the reference antibody to the epitope. Competitive inhibition may be determined by any method known in the art, for example, competition ELISA assays. An antibody may be said to competitively inhibit binding of the reference antibody to a given epitope by at least 90%, at least 80%, at least 70%, at least 60%, or at least 50%.

[0121] As used herein, the term “affinity” refers to a measure of the strength of the binding of an individual epitope with the CDR of an immunoglobulin molecule. See, e.g., Harlow et al., Antibodies: A Laboratory Manual, (Cold Spring Harbor Laboratory Press, 2nd ed. 1988) at pages 27-28. As used herein, the term “avidity” refers to the overall stability of the complex between a population of immunoglobulins and an antigen, that is, the functional combining strength of an immunoglobulin mixture with the antigen. See, e.g., Harlow at pages 29-34. Avidity is related to both the affinity of individual immunoglobulin molecules in the population with specific epitopes, and also the valencies of the immunoglobulins and the antigen. For example, the interaction between a bivalent monoclonal antibody and an antigen with a highly repeating epitope structure, such as a polymer, would be one of high avidity.

[0122] Antibodies or immunospecific fragments thereof for use in the diagnostic and therapeutic methods disclosed herein may also be described or specified in terms of their cross-reactivity. As used herein, the term “cross-reactivity” refers to the ability of an antibody, specific for one antigen, to react with a second antigen; a measure of relatedness between two different antigenic substances. Thus, an antibody is cross reactive if it binds to an epitope other than the one that induced its formation. The cross reactive epitope generally contains many of the same complementary structural features as the inducing epitope, and in some cases, may actually fit better than the original.

[0123] For example, certain antibodies have some degree of cross-reactivity, in that they bind related, but non-identical epitopes, e.g., epitopes with at least 95%, at least 90%, at least 85%, at least 80%, at least 75%, at least 70%, at least 65%, at least 60%, at least 55%, and at least 50% identity (as calculated using methods known in the art and described herein) to a reference epitope. An antibody may be said to have little or no cross-reactivity if it does not bind epitopes with less than 95%, less than 90%, less than 85%, less than 80%, less than 75%, less than 70%, less than 65%, less than 60%, less than 55%, and less than 50% identity (as calculated using methods known in the art and described herein) to a reference epitope. An antibody may be deemed “highly specific” for a certain epitope, if it does not bind any other analog, ortholog, or homolog of that epitope.

[0124] Antibodies or immunospecific fragments thereof for use in the diagnostic and treatment methods disclosed herein may also be described or specified in terms of their binding affinity to a polypeptide of the invention. Preferred binding affinities include those with a dissociation constant or Kd less than 5×10⁻² M, 10⁻² M, 5×10⁻³ M, 10⁻³ M, 5×10⁻⁴ M, 10⁻⁴ M, 5×10⁻⁵ M, 10⁻⁵ M, 5×10⁻⁶ M, 10⁻⁶ M, 5×10⁻⁷ M, 10⁻⁷ M, 5×10⁻⁸ M, 10⁻⁸ M, 5×10⁻⁹ M, 10⁻⁹ M, 5×10⁻¹⁰ M, 10⁻¹⁰ M, 5×10⁻¹¹ M, 10⁻¹¹ M, 5×10⁻¹² M, 10⁻¹² M, 5×10⁻¹³ M, 10⁻¹³ M, 5×10⁻¹⁴ M, 10⁻¹⁴ M, 5×10⁻¹⁵ M, or 10⁻¹⁵ M.

[0125] Antibodies or immunospecific fragments thereof for use in the diagnostic and treatment methods disclosed herein may act as agonists or antagonists of target polypeptides described herein. For example, an antibody for use in the methods of the present invention may function as an antagonist, blocking or inhibiting the activity of the lung, colon, pancreatic and/or ovarian cancer tumor-associated polypeptide.

[0126] As used herein, the term “binding site” or “binding domain” refers to a region of a binding molecule, e.g., a binding polypeptide, e.g., an antibody or fragment thereof, which is responsible for specifically binding to a target molecule of interest (e.g., an antigen, ligand, receptor, substrate or inhibitor) Exemplary binding domains include antibody variable domains, a receptor binding domain of a ligand, or a ligand binding domain of a receptor or an enzymatic domain. A binding domain on an antibody is referred to herein as an “antigen binding domain.”

[0127] A binding molecule, binding polypeptide, or antibody for use in the diagnostic and treatment methods disclosed herein may be “multispecific,” e.g., bispecific, trispecific or of greater multispecificity, meaning that it recognizes and binds to two or more different epitopes present on one or more different antigens (e.g., proteins) at the same time. Thus, whether a binding molecule is “monospecific” or “multispecific,” e.g., “bispecific,” refers to the number of different epitopes with which a binding polypeptide reacts. Multispecific antibodies may be specific for different epitopes of a target polypeptide described herein or may be specific for a target polypeptide as well as for a heterologous epitope, such as a heterologous polypeptide or solid support material.

[0128] As used herein the term “valency” refers to the number of potential binding domains, e.g., antigen binding domains, present in a binding molecule, binding polypeptide or antibody. Each binding domain specifically binds one epitope. When a binding molecule, binding polypeptide or antibody comprises more than one binding domain, each binding domain may specifically bind the same epitope, for an antibody with two binding domains, termed “bivalent monospecific,” or to different epitopes, for an antibody with two binding domains, termed “bivalent bispecific.” An antibody may also be bispecific and bivalent for each specificity (termed “bispecific tetravalent antibodies”). In another embodiment, tetravalent minibodies or domain deleted antibodies can be made.

[0129] Bispecific bivalent antibodies, and methods of making them, are described, for instance in U.S. Pat. Nos. 5,731,168; 5,807,706; 5,821,333; and U.S. Appl. Publ. Nos. 2003/020734 and 2002/0155537, the disclosures of all of which are incorporated by reference herein. Bispecific tetravalent antibodies, and methods of making them are described, for instance, in WO 02/096948 and WO 00/44788, the disclosures of both of which are incorporated by reference herein. See generally, PCT publications WO 93/17715; WO 92/08802; WO 91/00360; WO 92/05793; Tutt et al., J. Immunol. 147:60-69 (1991); U.S. Pat. Nos. 4,474,893; 4,714,681; 4,925,648; 5,573,920; 5,601,819; Kostelny et al., J. Immunol. 148:1547-1553 (1992).

[0130] As previously indicated, the subunit structures and three dimensional configuration of the constant regions of the various immunoglobulin classes are well known. As used herein, the term “VH domain” includes the amino terminal variable domain of an immunoglobulin heavy chain and the term “CH1 domain” includes the first (most amino terminal) constant region domain of an immunoglobulin heavy chain. The CH1 domain is adjacent to the VH domain and is amino terminal to the hinge region of an immunoglobulin heavy chain molecule.

[0131] As used herein the term “CH2 domain” includes the portion of a heavy chain molecule that extends, e.g., from about residue 244 to residue 360 of an antibody using conventional numbering schemes (residues 244 to 360, Kabat numbering system; and residues 231-340, EU numbering system; see Kabat E A et al. op. cit. The CH2 domain is unique in that it is not closely paired with another domain. Rather, two N-linked branched carbohydrate chains are interposed between the two CH2 domains of an intact native IgG molecule. It is also well documented that the CH3 domain extends from the CH2 domain to the C-terminal of the IgG molecule and comprises approximately 108 residues.

[0132] As used herein, the term “hinge region” includes the portion of a heavy chain molecule that joins the CH1 domain to the CH2 domain. This hinge region comprises approximately 25 residues and is flexible, thus allowing the two N-terminal antigen binding regions to move independently. Hinge regions can be subdivided into three distinct domains: upper, middle, and lower hinge domains (Roux et al., J. Immunol. 161:4083 (1998)).

[0133] As used herein the term “disulfide bond” includes the covalent bond formed between two sulfur atoms. The amino acid cysteine comprises a thiol group that can form a disulfide bond or bridge with a second thiol group. In most naturally occurring IgG molecules, the CH1 and CL regions are linked by a disulfide bond and the two heavy chains are linked by two disulfide bonds at positions corresponding to 239 and 242 using the Kabat numbering system (position 226 or 229, EU numbering system). Techniques for separating or preferentially synthesizing dimers which are linked via at least one interchain disulfide linkage from dimers which are not linked via at least one interchain disulfide linkage from a mixture comprising the two types of polypeptide dimer, and the use of such molecules in the preparation of antibody molecules, domain deleted antibody molecules (e.g., lacking all or part of a CH2 domain), minibodies, diabodies, fusion proteins, etc. are described in PCT/US2004/020945 (WO2005000899), the disclosure of which is incorporated by reference herein.

[0134] As used herein, the term “chimeric antibody” will be held to mean any antibody wherein the immunoreactive region or site is obtained or derived from a first species and the constant region (which may be intact, partial or modified in accordance with the instant invention) is obtained from a second species. In preferred embodiments the target binding region or site will be from a non-human source (e.g. mouse or primate) and the constant region is human.

[0135] As used herein, the term “engineered antibody” refers to an antibody in which the variable domain in either the heavy and light chain or both is altered by at least partial replacement of one or more CDRs from an antibody of known specificity and, if necessary, by partial framework region replacement and sequence changing. Although the CDRs may be derived from an antibody of the same class or even subclass as the antibody from which the framework regions are derived, it is envisaged that the CDRs will be derived from an antibody of different class and preferably from an antibody from a different species. An engineered antibody in which one or more “donor” CDRs from a non-human antibody of known specificity is grafted into a human heavy or light chain framework region is referred to herein as a “humanized antibody.” It may not be necessary to replace all of the CDRs with the complete CDRs from the donor variable region to transfer the antigen binding capacity of one variable domain to another. Rather, it may only be necessary to transfer those residues that are necessary to maintain the activity of the target binding site. Given the explanations set forth in, e.g., U.S. Pat. Nos. 5,585,089, 5,693,761, 5,693,762, and 6,180,370, it will be well within the competence of those skilled in the art, either by carrying out routine experimentation or by trial and error testing to obtain a functional engineered or humanized antibody.

[0136] As used herein, the term “antibody” (Ab) or “monoclonal antibody” (Mab) is meant to include intact molecules as well as antibody fragments (such as, for example, Fab and F(ab′)₂ fragments) which are capable of specifically binding to protein. Fab and F(ab′)₂ fragments lack the Fc fragment of intact antibody, clear more rapidly from the circulation, and may have less non-specific tissue binding than an intact antibody. (Wahl et al., J. Nucl. Med. 24:316-325 (1983).) Antibodies of the present invention also include chimeric, single chain, and humanized antibodies.

[0137] As used herein, the term “domain-deleted antibodies” refers to antibodies, or immunoreactive fragments thereof, in which at least a fraction of, or the entire region of, one or more of the constant region domains has been deleted or otherwise altered so as to provide desired biochemical characteristics such as increased tumor localization or reduced serum half-life when compared with an antibody of approximately the same immunogenicity comprising a native or unaltered constant region.

[0138] As used herein the term “properly folded polypeptide” includes polypeptides (e.g., antigen binding molecules such as antibodies) in which all of the functional domains comprising the polypeptide are distinctly active. As used herein, the term “improperly folded polypeptide” includes polypeptides in which at least one of the functional domains of the polypeptide is not active. In one embodiment, a properly folded polypeptide comprises polypeptide chains linked by at least one disulfide bond and, conversely, an improperly folded polypeptide comprises polypeptide chains not linked by at least one disulfide bond.

[0139] As used herein the term “engineered” includes manipulation of nucleic acid or polypeptide molecules by synthetic means (e.g. by recombinant techniques, in vitro peptide synthesis, by enzymatic or chemical coupling of peptides or some combination of these techniques).

[0140] As used herein, the terms “linked,” “fused” or “fusion” are used interchangeably. These terms refer to the joining together of two more elements or components, by whatever means including chemical conjugation or recombinant means. An “in-frame fusion” refers to the joining of two or more open reading frames (ORFs) to form a continuous longer ORF, in a manner that maintains the correct reading frame of the original ORFs. Thus, the resulting recombinant fusion protein is a single protein containing two ore more segments that correspond to polypeptides encoded by the original ORFs (which segments are not normally so joined in nature.) Although the reading frame is thus made continuous throughout the fused segments, the segments may be physically or spatially separated by, for example, in-frame linker sequence.

[0141] In the context of polypeptides, a “linear sequence” or a “sequence” is an order of amino acids in a polypeptide in an amino to carboxyl terminal direction in which residues that neighbor each other in the sequence are contiguous in the primary structure of the polypeptide.

[0142] The term “expression” as used herein refers to a process by which a gene produces a biochemical, for example, an RNA or polypeptide. The process includes any manifestation of the functional presence of the gene within the cell including, without limitation, gene knockdown as well as both transient expression and stable expression. It includes without limitation transcription of the gene into messenger RNA (mRNA), transfer RNA (tRNA), small hairpin RNA (shRNA), small interfering RNA (siRNA) or any other RNA product and the translation of such mRNA into polypeptide(s). If the final desired product is a biochemical, expression includes the creation of that biochemical and any precursors.

[0143] As used herein, the terms “treat” or “treatment” refer to both therapeutic treatment and prophylactic or preventative measures, wherein the object is to prevent or slow down (lessen) an undesired physiological change or disorder, such as the development or spread of cancer. Beneficial or desired clinical results include, but are not limited to, alleviation of symptoms, diminishment of extent of disease, stabilized (i.e., not worsening) state of disease, delay or slowing of disease progression, amelioration or palliation of the disease state, and remission (whether partial or total), whether detectable or undetectable. “Treatment” can also mean prolonging survival as compared to expected survival if not receiving treatment. Those in need of treatment include those already with the condition or disorder as well as those prone to have the condition or disorder or those in which the condition or disorder is to be prevented.

[0144] By “subject” or “individual” or “animal” or “patient” or “mammal,” is meant any subject, particularly a mammalian subject, for whom diagnosis, prognosis, or therapy is desired. Mammalian subjects include, but are not limited to, humans, domestic animals, farm animals, zoo animals, sport animals, pet animals such as dogs, cats, guinea pigs, rabbits, rats, mice, horses, cattle, cows; primates such as apes, monkeys, orangutans, and chimpanzees; canids such as dogs and wolves; fields such as cats, lions, and tigers; equids such as horses, donkeys, and zebras; food animals such as cows, pigs, and sheep; ungulates such as deer and giraffes; rodents such as mice, rats, hamsters and guinea pigs; and so on. In certain embodiments, the mammal is a human subject.

[0145] As used herein, phrases such as “a subject that would benefit from administration of a binding molecule” and “an animal in need of treatment” includes subjects, such as mammalian subjects, that would benefit from administration of a binding molecule used, e.g., for detection of an antigen recognized by a binding molecule (e.g., for a diagnostic procedure) and/or from treatment, i.e., palliation or prevention of a disease such as cancer, with a binding molecule which specifically binds a given target protein. As described in more detail herein, the binding molecule can be used in unconjugated form or can be conjugated, e.g., to a drug, prodrug, or an isotope.

[0146] By “hyperproliferative disease or disorder” is meant all neoplastic cell growth and proliferation, whether malignant or benign, including all transformed cells and tissues and all cancerous cells and tissues. Hyperproliferative diseases or disorders include, but are not limited to, precancerous lesions, abnormal cell growths, benign tumors, malignant tumors, and “cancer.”

[0147] Additional examples of hyperproliferative diseases, disorders, and/or conditions include, but are not limited to neoplasms, whether benign or malignant, located in the: prostate, colon, abdomen, bone, breast, digestive system, liver, pancreas, peritoneum, endocrine glands (adrenal, parathyroid, pituitary, testicles, ovary, thymus, thyroid), eye, head and neck, nervous (central and peripheral), lymphatic system, pelvic, skin, soft tissue, spleen, thoracic, and urogenital tract.

[0148] Other hyperproliferative disorders include, but are not limited to: hypergammaglobulinemia, lymphoproliferative disorders, paraproteinemias, purpura, sarcoidosis, Sezary Syndrome, Waldenstron's macroglobulinemia, Gaucher's Disease, histiocytosis, and any other hyperproliferative disease, besides neoplasia, located in an organ system listed above.

[0149] As used herein, the terms “tumor” or “tumor tissue” refer to an abnormal mass of tissue that results from excessive cell division. A tumor or tumor tissue comprises “tumor cells” which are neoplastic cells with abnormal growth properties and no useful bodily function. Tumors, tumor tissue and tumor cells may be benign or malignant. A tumor or tumor tissue may also comprise “tumor-associated non-tumor cells”, e.g., vascular cells which form blood vessels to supply the tumor or tumor tissue. Non-tumor cells may be induced to replicate and develop by tumor cells, for example, the induction of angiogenesis in a tumor or tumor tissue.

[0150] As used herein, the term “malignancy” refers to a non-benign tumor or a cancer. As used herein, the term “cancer” connotes a type of hyperproliferative disease which includes a malignancy characterized by deregulated or uncontrolled cell growth. Examples of cancer include, but are not limited to, carcinoma, lymphoma, blastoma, sarcoma, and leukemia or lymphoid malignancies. More particular examples of such cancers are noted below and include: squamous cell cancer (e.g. epithelial squamous cell cancer), lung cancer including small-cell lung cancer, non-small cell lung cancer, adenocarcinoma of the lung and squamous carcinoma of the lung, cancer of the peritoneum, hepatocellular cancer, gastric or stomach cancer including gastrointestinal cancer, pancreatic cancer, glioblastoma, cervical cancer, ovarian cancer, liver cancer, bladder cancer, hepatoma, breast cancer, colon cancer including adenocarcinoma of the colon, squamous cell carcinoma of the colon, sarcoma, lymphoma, melanoma, carcinoid of the colon, rectal cancer, colorectal cancer, endometrial cancer or uterine carcinoma, salivary gland carcinoma, kidney or renal cancer, prostate cancer, vulval cancer, thyroid cancer, hepatic carcinoma, anal carcinoma, penile carcinoma, as well as head and neck cancer. The term “cancer” includes primary malignant cells or tumors (e.g., those whose cells have not migrated to sites in the subject's body other than the site of the original malignancy or tumor) and secondary malignant cells or tumors (e.g., those arising from metastasis, the migration of malignant cells or tumor cells to secondary sites that are different from the site of the original tumor).

[0151] Other examples of cancers or malignancies include, but are not limited to: Acute Childhood Lymphoblastic Leukemia, Acute Lymphoblastic Leukemia, Acute Lymphocytic Leukemia, Acute Myeloid Leukemia, Adrenocortical Carcinoma, Adult (Primary) Hepatocellular Cancer, Adult (Primary) Liver Cancer, Adult Acute Lymphocytic Leukemia, Adult Acute Myeloid Leukemia, Adult Hodgkin's Disease, Adult Hodgkin's Lymphoma, Adult Lymphocytic Leukemia, Adult Non-Hodgkin's Lymphoma, Adult Primary Liver Cancer, Adult Soft Tissue Sarcoma, AIDS-Related Lymphoma, AIDS-Related Malignancies, Anal Cancer, Astrocytoma, Bile Duct Cancer, Bladder Cancer, Bone Cancer, Brain Stem Glioma, Brain Tumors, Breast Cancer, Cancer of the Renal Pelvis and Ureter, Central Nervous System (Primary) Lymphoma, Central Nervous System Lymphoma, Cerebellar Astrocytoma, Cerebral Astrocytoma, Cervical Cancer, Childhood (Primary) Hepatocellular Cancer, Childhood (Primary) Liver Cancer, Childhood Acute Lymphoblastic Leukemia, Childhood Acute Myeloid Leukemia, Childhood Brain Stem Glioma, Childhood Cerebellar Astrocytoma, Childhood Cerebral Astrocytoma, Childhood Extracranial Germ Cell Tumors, Childhood Hodgkin's Disease, Childhood Hodgkin's Lymphoma, Childhood Hypothalamic and Visual Pathway Glioma, Childhood Lymphoblastic Leukemia, Childhood Medulloblastoma, Childhood Non-Hodgkin's Lymphoma, Childhood Pineal and Supratentorial Primitive Neuroectodermal Tumors, Childhood Primary Liver Cancer, Childhood Rhabdomyosarcoma, Childhood Soft Tissue Sarcoma, Childhood Visual Pathway and Hypothalamic Glioma, Chronic Lymphocytic Leukemia, Chronic Myelogenous Leukemia, Colon Cancer, Cutaneous T-Cell Lymphoma, Endocrine Pancreas Islet Cell Carcinoma, Endometrial Cancer, Ependymoma, Epithelial Cancer, Esophageal Cancer, Ewing's Sarcoma and Related Tumors, Exocrine Pancreatic Cancer, Extracranial Germ Cell Tumor, Extragonadal Germ Cell Tumor, Extrahepatic Bile Duct Cancer, Eye Cancer, Female Breast Cancer, Gaucher's Disease, Gallbladder Cancer, Gastric Cancer, Gastrointestinal Carcinoid Tumor, Gastrointestinal Tumors, Germ Cell Tumors, Gestational Trophoblastic Tumor, Hairy Cell Leukemia, Head and Neck Cancer, Hepatocellular Cancer, Hodgkin's Disease, Hodgkin's Lymphoma, Hypergammaglobulinemia, Hypopharyngeal Cancer, Intestinal Cancers, Intraocular Melanoma, Islet Cell Carcinoma, Islet Cell Pancreatic Cancer, Kaposi's Sarcoma, Kidney Cancer, Laryngeal Cancer, Lip and Oral Cavity Cancer, Liver Cancer, Lung Cancer, Lymphoproliferative Disorders, Macroglobulinemia, Male Breast Cancer, Malignant Mesothelioma, Malignant Thymoma, Medulloblastoma, Melanoma, Mesothelioma, Metastatic Occult Primary Squamous Neck Cancer, Metastatic Primary Squamous Neck Cancer, Metastatic Squamous Neck Cancer, Multiple Myeloma, Multiple Myeloma/Plasma Cell Neoplasm, Myelodysplastic Syndrome, Myelogenous Leukemia, Myeloid Leukemia, Myeloproliferative Disorders, Nasal Cavity and Paranasal Sinus Cancer, Nasopharyngeal Cancer, Neuroblastoma, Non-Hodgkin's Lymphoma During Pregnancy, Nonmelanoma Skin Cancer, Non-Small Cell Lung Cancer, Occult Primary Metastatic Squamous Neck Cancer, Oropharyngeal Cancer, Osteo-/Malignant Fibrous Sarcoma, Osteosarcoma/Malignant Fibrous Histiocytoma, Osteosarcoma/Malignant Fibrous Histiocytoma of Bone, Ovarian Epithelial Cancer, Ovarian Germ Cell Tumor, Ovarian Low Malignant Potential Tumor, Pancreatic Cancer, Paraproteinemias, Purpura, Parathyroid Cancer, Penile Cancer, Pheochromocytoma, Pituitary Tumor, Plasma Cell Neoplasm/Multiple Mycloma, Primary Central Nervous System Lymphoma, Primary Liver Cancer, Prostate Cancer, Rectal Cancer, Renal Cell Cancer, Renal Pelvis and Ureter Cancer, Retinoblastoma, Rhabdomyosarcoma, Salivary Gland Cancer, Sarcoidosis Sarcomas, Sezary Syndrome, Skin Cancer, Small Cell Lung Cancer, Small Intestine Cancer, Soft Tissue Sarcoma, Squamous Neck Cancer, Stomach Cancer, Supratentorial Primitive Neuroectodermal and Pineal Tumors, T-Cell Lymphoma, Testicular Cancer, Thymoma, Thyroid Cancer, Transitional Cell Cancer of the Renal Pelvis and Ureter, Transitional Renal Pelvis and Ureter Cancer, Trophoblastic Tumors, Ureter and Renal Pelvis Cell Cancer, Urethral Cancer, Uterine Cancer, Uterine Sarcoma, Vaginal Cancer, Visual Pathway and Hypothalamic Glioma, Vulvar Cancer, Waldenstrom's Macroglobulinemia, Wilms' Tumor, and any other hyperproliferative disease, besides neoplasia, located in an organ system listed above.

[0152] The method of the present invention may be used to treat premalignant conditions and to prevent progression to a neoplastic or malignant state, including but not limited to those disorders described above. Such uses are indicated in conditions known or suspected of preceding progression to neoplasia or cancer, in particular, where non-neoplastic cell growth consisting of hyperplasia, metaplasia, or most particularly, dysplasia has occurred (for review of such abnormal growth conditions, see Robbins and Angell, Basic Pathology, 2d Ed., W. B. Saunders Co., Philadelphia, pp. 68-79 (1976)

[0153] Hyperplasia is a form of controlled cell proliferation, involving an increase in cell number in a tissue or organ, without significant alteration in structure or function. Hyperplastic disorders which can be treated by the method of the invention include, but are not limited to, angiofollicular mediastinal lymph node hyperplasia, angiolymphoid hyperplasia with eosinophilia, atypical melanocytic hyperplasia, basal cell hyperplasia, benign giant lymph node hyperplasia, cementum hyperplasia, congenital adrenal hyperplasia, congenital sebaceous hyperplasia, cystic hyperplasia, cystic hyperplasia of the breast, denture hyperplasia, ductal hyperplasia, endometrial hyperplasia, fibromuscular hyperplasia, focal epithelial hyperplasia, gingival hyperplasia, inflammatory fibrous hyperplasia, inflammatory papillary hyperplasia, intravascular papillary endothelial hyperplasia, nodular hyperplasia of prostate, nodular regenerative hyperplasia, pseudoepitheliomatous hyperplasia, senile sebaceous hyperplasia, and verrucous hyperplasia.

[0154] Metaplasia is a form of controlled cell growth in which one type of adult or fully differentiated cell substitutes for another type of adult cell. Metaplastic disorders which can be treated by the method of the invention include, but are not limited to, agnogenic myeloid metaplasia, apocrine metaplasia, atypical metaplasia, autoparenchymatous metaplasia, connective tissue metaplasia, epithelial metaplasia, intestinal metaplasia, metaplastic anemia, metaplastic ossification, metaplastic polyps, myeloid metaplasia, primary myeloid metaplasia, secondary myeloid metaplasia, squamous metaplasia, squamous metaplasia of amnion, and symptomatic myeloid metaplasia.

[0155] Dysplasia is frequently a forerunner of cancer, and is found mainly in the epithelia; it is the most disorderly form of non-neoplastic cell growth, involving a loss in individual cell uniformity and in the architectural orientation of cells. Dysplastic cells often have abnormally large, deeply stained nuclei, and exhibit pleomorphism. Dysplasia characteristically occurs where there exists chronic irritation or inflammation. Dysplastic disorders which can be treated by the method of the invention include, but are not limited to, anhidrotic ectodermal dysplasia, anterofacial dysplasia, asphyxiating thoracic dysplasia, atriodigital dysplasia, bronchopulmonary dysplasia, cerebral dysplasia, cervical dysplasia, chondroectodermal dysplasia, cleidocranial dysplasia, congenital ectodermal dysplasia, craniodiaphysial dysplasia, craniocarpotarsal dysplasia, craniometaphysial dysplasia, dentin dysplasia, diaphysial dysplasia, ectodermal dysplasia, enamel dysplasia, encephalo-ophthalmic dysplasia, dysplasia epiphysialis hemimelia, dysplasia epiphysialis multiplex, dysplasia epiphysialis punctata, epithelial dysplasia, faciodigitogenital dysplasia, familial fibrous dysplasia of jaws, familial white folded dysplasia, fibromuscular dysplasia, fibrous dysplasia of bone, florid osseous dysplasia, hereditary renal-retinal dysplasia, hidrotic ectodermal dysplasia, hypohidrotic ectodermal dysplasia, lymphopenic thymic dysplasia, mammary dysplasia, mandibulofacial dysplasia, metaphysial dysplasia, Mondini dysplasia, monostotic fibrous dysplasia, mucoepithelial dysplasia, multiple epiphysial dysplasia, oculoauriculovertebral dysplasia, oculodentodigital dysplasia, oculovertebral dysplasia, odontogenic dysplasia, opthalmomandibulomelic dysplasia, periapical cemental dysplasia, polyostotic fibrous dysplasia, pseudoachondroplastic spondyloepiphysial dysplasia, retinal dysplasia, septo-optic dysplasia, spondyloepiphysial dysplasia, and ventriculoradial dysplasia.

[0156] Additional pre-neoplastic disorders which can be treated by the method of the invention include, but are not limited to, benign dysproliferative disorders (e.g., benign tumors, fibrocystic conditions, tissue hypertrophy, intestinal polyps, colon polyps, and esophageal dysplasia), leukoplakia, keratoses, Bowen's disease, Farmer's Skin, solar cheilitis, and solar keratosis.

[0157] In preferred embodiments, the method of the invention is used to inhibit growth, progression, and/or metastasis of cancers, in particular those listed above.

[0158] Additional hyperproliferative diseases, disorders, and/or conditions include, but are not limited to, progression, and/or metastases of malignancies and related disorders such as leukemia (including acute leukemias (e.g., acute lymphocytic leukemia, acute myelocytic leukemia (including myeloblastic, promyelocytic, myelomonocytic, monocytic, and erythroleukemia)) and chronic leukemias (e.g., chronic myelocytic (granulocytic) leukemia and chronic lymphocytic leukemia)), polycythemia vera, lymphomas (e.g., Hodgkin's disease and non-Hodgkin's disease), multiple myeloma, Waldenstrom's macroglobulinemia, heavy chain disease, and solid tumors including, but not limited to, sarcomas and carcinomas such as fibrosarcoma, myxosarcoma, liposarcoma, chondrosarcoma, osteogenic sarcoma, chordoma, angiosarcoma, endotheliosarcoma, lymphangiosarcoma, lymphangioendotheliosarcoma, synovioma, mesothelioma, Ewing's tumor, leiomyosarcoma, rhabdomyosarcoma, colon carcinoma, pancreatic cancer, breast cancer, ovarian cancer, prostate cancer, squamous cell carcinoma, basal cell carcinoma, adenocarcinoma, sweat gland carcinoma, sebaceous gland carcinoma, papillary carcinoma, papillary adenocarcinomas, cystadenocarcinoma, medullary carcinoma, bronchogenic carcinoma, renal cell carcinoma, hepatoma, bile duct carcinoma, choriocarcinoma, seminoma, embryonal carcinoma, Wilm's tumor, cervical cancer, testicular tumor, lung carcinoma, small cell lung carcinoma, bladder carcinoma, epithelial carcinoma, glioma, astrocytoma, medulloblastoma, craniopharyngioma, ependymoma, pinealoma, emangioblastoma, acoustic neuroma, oligodendroglioma, menangioma, melanoma, neuroblastoma, and retinoblastoma.

[0159] The present invention is predicated, at least in part, on the discovery of novel methods for identifying and employing nucleotides that encode membrane associated molecules, i.e., nucleic acid molecules which encode transmembrane proteins or that encode molecules with membrane associated motifs. As will be set forth in more detail below, the present invention further comprises methods of using these identified nucleic acid molecules to generate custom arrays to identify markers associated with various diseases and disorders, e.g., lung, colon, pancreatic and ovarian cancer as well as autoimmune diseases or disorders. In a particularly preferred embodiment the instant invention comprises small molecules, ligands or immunoreactive species that bind to or otherwise associate with the identified membrane associated molecules. Those skilled in the art will appreciate that such moieties may advantageously be used in the prevention, diagnosis or treatment of diseases or disorders presenting the disclosed membrane associated molecules. The invention further relates to various methods, reagents and kits for diagnosing, staging, prognosing, preventing, monitoring and treating hyperproliferative diseases or disorders such as cancer or autoimmune diseases or disorders.

[0160] As will be explained in some detail, the present invention provides novel methods of culling information to identify and categorize membrane associated molecules (and their encoding nucleotides) that exhibit altered expression profiles associated with selected diseases or disorders. FIG. 1 provides an illustrative diagram showing preferred methods for associating a plurality of nucleotides encoding membrane associated molecules wherein such nucleotides may be employed to produce an array in accordance with the teachings herein.

[0161] Referring now to FIG. 1, a transmembrane selection set of molecules is produced using a publicly available sequence database (e.g., the Ensemble™ database), through the application of a model for membrane protein topology prediction, for example the Transmembrane hidden Markov model (TMHMM) (Krogh et al., (2001) J. Mol. Biol. 305, 567-580); incorporated herein by reference). Those skilled in the art will appreciate that the resulting transmembrane selection set comprises a plurality of membrane associated molecules. Sequences represented by the molecules in the transmembrane selection set are then screened against or compared to sequences set forth on one or more commercially available arrays e.g., an Affymetrix™ array. Those sequences from the transmembrane selection set that exhibit substantial homology to molecules set forth on the array or arrays are then excluded to provide a further subset or association of a plurality of molecules termed, for the purposes of this application, a transmembrane signature set. For the elimination of confusion, molecular sequences or homologs thereof found on commercially available arrays are referred to herein as “array associated molecules.” Those skilled in the art will appreciate that all or some of the plurality of molecules comprising the transmembrane signature set, their complement or hybridizing fragments thereof, may be associated with a substrate using well known techniques to provide an array in accordance with the teachings herein.

[0162] In another aspect of the present invention, those molecules excluded from the transmembrane selection set as set forth immediately above may be compared to or screened against sequences comprising a publicly available expression database (e.g., the Genelogic™ expression database). For such a comparison, those previously excluded sequences which do not have substantial intensity values with respect to sequences set forth in the expression database may be associated to provide a further subset of molecules termed, in this application, an expression signature set. Those skilled in the art will appreciate that the plurality of molecules comprising the expression signature set, their complement or hybridizing fragments thereof, may be associated with a substrate using well known techniques to provide an array in accordance with the teachings herein. In particularly preferred embodiments the plurality of molecules comprising the expression signature set will be combined with the plurality of molecules comprising the transmembrane signature set to provide another association of molecules termed the master transmembrane signature set. It will be appreciated that some or all of the molecules comprising this master transmembrane signature set may be used to generate an array in accordance with the present invention.

[0163] In yet another aspect, the publicly available database may be screened or interrogated for the presence of sequences exhibiting a GPI link, ITIM, ITAM, ITSM motif to yield a motif selection set. The skilled artisan will appreciate that such protein motifs are typically found in and, accordingly are representative of, membrane associated molecules. The sequences of molecules comprising the motif selection set are then compared to, or screened against, the sequences of molecules, or their homologs, set forth on one or more commercially available arrays (array associated molecules). Those molecular sequences of the motif selection set that exhibit substantial homology with one or more molecules found on the commercially available arrays are excluded, thereby yielding yet a further subset of molecules referred to herein as a motif signature set. Once again, those skilled in the art will appreciate that all or some of the plurality of molecules comprising the motif signature set, their complement or hybridizing fragments thereof, may be associated with a substrate using well known techniques to provide an array in accordance with the teachings herein. In a particularly preferred embodiment, and as set forth in the examples below, some or all of the molecules of the motif signature set may be combined with some or all of the molecules of the master transmembrane signature set to provide an association of molecules termed, for the purposes of this application, a screening signature set. It will be appreciated that some or all of the molecules comprising this screening signature set, their complement or hybridizing fragments thereof, may be used to generate an array in accordance with the present invention.

[0164] As indicated above, the methods of the present invention may use all or part of the previously identified sets of molecules, i.e., the transmembrane signature set, expression signature set, motif signature set, master transmembrane signature set and/or screening signature set, to generate one or more custom arrays. These custom arrays may be used for, among other things, the screening for potential markers or therapeutic targets associated with various hyperproliferative diseases or disorders including cancer and autoimmune diseases. The invention further relates to various methods, reagents and kits for diagnosing, staging, prognosing, monitoring and treating hyperproliferative diseases or disorders such as cancer, e.g., lung, colon, pancreatic and ovarian cancer and autoimmune diseases.

### SELECTED EMBODIMENTS

[0165] The present invention is based, in part, on membrane associated markers which have altered expression in a sample from a subject afflicted with a hyperproliferative disease or disorder, such as cancer, e.g., lung, colon, pancreatic and ovarian cancer or an autoimmune disease, as compared to their expression in a normal sample (i.e. non-diseased) cells. The enhanced expression of one or more of these markers in a sample from a subject afflicted with a hyperproliferative disease or disorder is herein correlated with a hyperproliferative disease or disorder such as cancer e.g., lung, colon, pancreatic and ovarian cancer or an autoimmune disease. The invention provides compositions, kits, and methods for assessing a hyperproliferative disease or disorder in a sample (e.g. cells obtained from a human, cultured human cells, archived or preserved human cells and in vivo cells) as well as treating patients afflicted with a hyperproliferative disease or disorder such as cancer, e.g., lung, colon, pancreatic and ovarian cancer or an autoimmune disease.

[0166] The compositions, kits, and methods of the invention have the following uses, among others:

[0167] 1) assessing whether a patient is afflicted with a hyperproliferative disease or disorder;

[0168] 2) assessing the stage of a hyperproliferative disease or disorder, such as cancer, in a human patient;

[0169] 3) assessing the grade of a hyperproliferative disease or disorder, such as cancer, in a patient;

[0170] 4) assessing the benign or malignant nature of a hyperproliferative disease or disorder, such as cancer, in a patient;

[0171] 5) assessing the metastatic potential of a hyperproliferative disease or disorder, such as cancer, in a patient;

[0172] 6) assessing the histological type of neoplasm associated with a hyperproliferative disease or disorder, such as cancer, in a patient;

[0173] 7) making antibodies, antibody fragments or antibody derivatives that are useful for treating a hyperproliferative disease or disorder and/or assessing whether a patient is afflicted with a hyperproliferative disease or disorder;

[0174] 8) assessing the presence of a hyperproliferative disease or disorder in a sample;

[0175] 9) assessing the efficacy of one or more test compounds for inhibiting a hyperproliferative disease or disorder in a patient;

[0176] 10) assessing the efficacy of a therapy for inhibiting a hyperproliferative disease or disorder in a patient;

[0177] 11) monitoring the progression of a hyperproliferative disease or disorder in a patient;

[0178] 12) selecting a composition or therapy for inhibiting a hyperproliferative disease or disorder in a patient;

[0179] 13) treating a patient afflicted with a hyperproliferative disease or disorder;

[0180] 14) inhibiting a hyperproliferative disease or disorder in a patient;

[0181] 15) assessing the test compound for treating or preventing a hyperproliferative disease or disorder, such as cancer;

[0182] 16) preventing the onset of a hyperproliferative disease or disorder in a patient at risk for developing a hyperproliferative disease or disorder;

[0183] 17) assessing siRNA molecules for treating or preventing a hyperproliferative disease or disorder, such as cancer; and

[0184] 18) preventing the onset of a hyperproliferative disease or disorder in a patient at risk for developing a hyperproliferative disease or disorder.

[0185] The invention thus includes a method of diagnosing whether a patient is afflicted with a hyperproliferative disease or disorder. This method comprises comparing the level of expression of a marker of the invention (for example, a marker associated with lung, colon, pancreatic and ovarian cancer as listed in Tables 7-10, respectively) in a patient sample and the normal level of expression of the marker in a control, e.g., a non-diseased sample. A significantly higher level of expression of the marker in the patient sample as compared to the normal level is an indication that the patient is afflicted with a hyperproliferative disease or disorder such as cancer e.g., lung, colon, pancreatic and ovarian cancer.

[0186] As described herein, a hyperproliferative disease or disorder in a patient is associated with an altered level of expression of one or more markers of the invention. While, as discussed above, some of these changes in expression level result from occurrence of the hyperproliferative disease or disorder, others of these changes induce, maintain, and promote cell growth from a subject associated with a hyperproliferative disease or disorder. Thus, a hyperproliferative disease or disorder characterized by an increase in the level of expression of one or more markers of the invention can be inhibited by reducing and/or interfering with the expression of the markers and/or function of the proteins encoded by those markers. Expression of a marker of the invention can be inhibited in a number of ways generally known in the art. For example, an antisense oligonucleotide can be provided to the cells from a subject associated with a hyperproliferative disease or disorder in order to inhibit transcription, translation, or both, of the marker(s). Alternately, a polynucleotide encoding an antibody, an antibody derivative, or an antibody fragment which specifically binds a marker protein, and operably linked with an appropriate promoter/regulator region, can be provided to the cell in order to generate intracellular antibodies which will inhibit the function or activity of the protein. The expression and/or function of a marker may also be inhibited by treating the cell associated with a hyperproliferative disease or disorder with an antibody, antibody derivative or antibody fragment that specifically binds a marker protein. Using the methods described herein, a variety of molecules, particularly including molecules sufficiently small that they are able to cross the cell membrane, can be screened in order to identify molecules which inhibit expression of a marker or inhibit the function of a marker protein. The compound so identified can be provided to the patient in order to inhibit a hyperproliferative disease in the patient.

[0187] Any marker or combination of markers of the invention, as well as any known markers in combination with the markers of the invention, may be used in the compositions, kits, and methods of the present invention. In general, it is preferable to use markers for which the difference between the level of expression of the marker in a sample from a subject associated with a hyperproliferative disease or disorder and the level of expression of the same marker in a normal sample, is as great as possible. Although this difference can be as small as the limit of detection of the method for assessing expression of the marker, it is preferred that the difference be at least greater than the standard error of the assessment method, and preferably a difference of at least 2-, 3-, 4-, 5-, 6-, 7-, 8-, 9-, 10-, 15-, 20-, 25-, 100-, 500-, 1000-fold or greater than the level of expression of the same marker in a normal sample.

[0188] It will be appreciated that patient samples or “target samples” may be used in the methods of the present invention. In these embodiments, the level of expression of the marker can be assessed by assessing the amount (e.g., absolute amount or concentration) of the marker in a cell sample. The cell sample can, of course, be subjected to a variety of well-known post-collection preparative and storage techniques (e.g., nucleic acid and/or protein extraction, fixation, storage, freezing, ultrafiltration, concentration, evaporation, centrifugation, etc.) prior to assessing the amount of the marker in the sample.

[0189] Expression of a marker of the invention may be assessed by any of a wide variety of well known methods for detecting expression of a transcribed nucleic acid or protein. Non-limiting examples of such methods include immunological methods for detection of cell-surface, nuclear proteins, protein purification methods, protein function or activity assays, nucleic acid hybridization methods e.g., using the arrays of the invention, nucleic acid reverse transcription methods, and nucleic acid amplification methods.

[0190] In one embodiment, expression of a marker is assessed using an antibody (e.g. a radio-labeled, chromophore-labeled, fluorophore-labeled, or enzyme-labeled antibody), an antibody derivative (e.g. an antibody conjugated with a substrate or with the protein or ligand of a protein-ligand pair {e.g. biotin-streptavidin), or an antibody fragment (e.g. a single-chain antibody, an isolated antibody hypervariable domain, etc.) which binds specifically with a marker protein or fragment thereof, including a marker protein which has undergone all or a portion of its normal post-translational modification.

[0191] In another embodiment, expression of a marker is assessed by preparing mRNA/cDNA (i.e. a transcribed polynucleotide) from cells in a patient sample, and by hybridizing the mRNA/cDNA with a reference polynucleotide which is a complement of a marker nucleic acid, or a fragment thereof. cDNA can, optionally, be amplified using any of a variety of polymerase chain reaction or in vitro transcription methods prior to hybridization with the reference polynucleotide; preferably, it is not amplified. Expression of one or more markers can likewise be detected using quantitative PCR to assess the level of expression of the marker(s). Alternatively, any of the many known methods of detecting mutations or variants (e.g. single nucleotide polymorphisms, deletions, etc.) of a marker of the invention may be used to detect occurrence of a marker in a patient.

[0192] In a related embodiment, a mixture of transcribed polynucleotides obtained from the sample is contacted with a substrate, having fixed thereto a polynucleotide complementary to or homologous with at least a portion (e.g. at least 7, 10, 15, 20, 25, 30, 40, 50, 100, 500, or more nucleotide residues) of a marker nucleic acid e.g., an array as described herein. If polynucleotides complementary to or homologous with are differentially detectable on the substrate (e.g. detectable using different chromophores or fluorophores, or fixed to different selected positions), then the levels of expression of a plurality of markers can be assessed simultaneously using a single substrate (e.g. a “gene chip” array of polynucleotides fixed at selected positions). When a method of assessing marker expression is used which involves hybridization of one nucleic acid with another, it is preferred that the hybridization be performed under stringent hybridization conditions.

[0193] Because the compositions, kits, and methods of the invention rely on detection of a difference in expression levels of one or more markers of the invention, it is preferable that the level of expression of the marker is significantly greater than the minimum detection limit of the method used to assess expression in at least one of normal cells and diseased cells.

[0194] When the compositions, kits, and methods of the invention are used for characterizing one or more of the stage, grade, histological type, and benign/malignant nature of a cancer, e.g., lung, colon, pancreatic and ovarian cancer, in a patient, it is preferred that the marker or panel of markers of the invention is selected such that a positive result is obtained in at least about 20%, and preferably at least about 40%, 60%, or 80%, and more preferably in substantially all patients afflicted with a cancer, e.g., lung, colon, pancreatic and ovarian cancer, of the corresponding stage, grade, histological type, or benign/malignant nature. Preferably, the marker or panel of markers of the invention is selected such that a positive predictive value (PPV) of greater than about 10% is obtained for the general population (more preferably coupled with an assay specificity greater than 80%).

[0195] When a plurality of markers of the invention are used in the compositions, kits, and methods of the invention, the level of expression of each marker in a patient sample can be compared with the normal level of expression of each of the plurality of markers in a non-diseased sample of the same type, either in a single reaction mixture (i.e. using reagents, such as different fluorescent probes, for each marker) or in individual reaction mixtures corresponding to one or more of the markers. In one embodiment, a significantly increased level of expression of more than one of the plurality of markers in the sample, relative to the corresponding normal levels, is an indication that the patient is afflicted with a hyperproliferative disease or disorder. When a plurality of markers is used, 2, 3, 4, 5, 8, 10, 12, 15, 20, 30, or 50 or more individual markers may be used, wherein fewer markers may also be used. In another embodiment, a plurality of markers may include 10%, 15%, 20%, 25%, 30%, 35%, 40%, 45%, 50%, 55%, 60%, 65%, 70%, 75%, 80%, 85%, 90%, 91%, 92%, 93%, 94%, 95%, 96%, 97%, 98%, 99% or 100% of the transmembrane signature set, screening signature set, motif signature set or the master transmembrane signature set.

[0196] In order to maximize the sensitivity of the compositions, kits, and methods of the invention it is preferable that the marker of the invention used therein be a marker which has a restricted tissue distribution.

[0197] Markers previously known to be associated with a hyperproliferative disease or disorder may be used together with one or more markers of the invention in a panel of markers, for example. It is well known that certain types of genes, such as oncogenes, tumor suppressor genes, growth factor-like genes, protease-like genes, and protein kinase-like genes are often involved with development of cancers of various types. Thus, among the markers of the invention which are associated with cancer, use of those which correspond to proteins which resemble known proteins encoded by known oncogenes and tumor suppressor genes are preferred.

[0198] It is recognized that the compositions, kits, and methods of the invention will be of particular utility to patients having an enhanced risk of developing a hyperproliferative disease or disorder and their medical advisors. Patients recognized as having an enhanced risk of developing a hyperproliferative disease or disorder include, for example, patients having a familial history of a hyperproliferative disease or disorder, such as cancer e.g., lung, colon, pancreatic and ovarian cancer.

[0199] The level of expression of a marker in normal (i.e. non-diseased) human tissue can be assessed in a variety of ways. In one embodiment, this normal level of expression is assessed by assessing the level of expression of the marker in a portion of cells which appears to be non-diseased and by comparing this normal level of expression with the level of expression in a portion of the cells which is suspected of being associated with a hyperproliferative disease or disorder. Alternately, and particularly as further information becomes available as a result of routine performance of the methods described herein, population-average values for normal expression of the markers of the invention may be used. In other embodiments, the ‘normal’ level of expression of a marker may be determined by assessing expression of the marker in a patient sample obtained from a healthy patient, from a patient sample obtained from a patient before the suspected onset of a hyperproliferative disease or disorder, from archived patient samples, and the like.

[0200] The invention includes compositions, kits, and methods for assessing the presence of cells from a subject associated with a hyperproliferative disease or disorder (e.g. an archived tissue sample or a sample obtained from a patient), using, for example, an array of the invention. These compositions, kits, and methods are substantially the same as those described above, except that, where necessary, the compositions, kits, and methods are adapted for use with samples other than patient samples. For example, when the sample to be used is a parafinized, archived human tissue sample, it can be necessary to adjust the ratio of compounds in the compositions of the invention, in the kits of the invention, or the methods used to assess levels of marker expression in the sample. Such methods are well known in the art and within the skill of the ordinary artisan.

[0201] The invention includes a kit for assessing the presence of cells from a subject associated with a hyperproliferative disease or disorder as (e.g. in a sample such as a patient sample). The kit comprises a plurality of reagents, each of which is capable of binding specifically with a marker nucleic acid or protein. Suitable reagents for binding with a marker protein include antibodies, antibody derivatives, antibody fragments, and the like. Suitable reagents for binding with a marker nucleic acid (e.g. a genomic DNA, an mRNA, a spliced mRNA, a cDNA, or the like) include complementary nucleic acid molecules. For example, the nucleic acid reagents may include oligonucleotides (labeled or non-labeled) fixed to a substrate, labeled oligonucleotides not bound with a substrate, pairs of PCR primers, molecular beacon probes, and the like.

[0202] The kit of the invention may optionally comprise additional components useful for performing the methods of the invention. By way of example, the kit may comprise fluids (e.g. SSC buffer) suitable for annealing complementary nucleic acid molecules or for binding an antibody with a protein with which it specifically binds, one or more sample compartments, an instructional material which describes performance of a method of the invention, a sample of normal cells, a sample of diseased cells, and the like.

[0203] The invention also includes a method of assessing the efficacy of a test compound for inhibiting a disease or disorder associated with a membrane molecule, using, for example, an array of the invention. As described above, differences in the level of expression of the markers of the invention correlate with cells from a subject associated with a hyperproliferative disease or disorder. Although it is recognized that changes in the levels of expression of certain of the markers of the invention likely result from the cells from a subject associated with a hyperproliferative disease or disorder, it is likewise recognized that changes in the levels of expression of other of the markers of the invention induce, maintain, and promote the diseased state of those cells. Thus, compounds which inhibit a hyperproliferative disease or disorder in a patient will cause the level of expression of one or more of the markers of the invention to change to a level nearer the normal level of expression for that marker (i.e. the level of expression for the marker in cells not associated with a hyperproliferative disease or disorder).

[0204] This method thus comprises comparing expression of a marker in a first sample and maintained in the presence of the test compound and expression of the marker in a second sample and maintained in the absence of the test compound. A significantly reduced expression of a marker of the invention in the presence of the test compound is an indication that the test compound inhibits a hyperproliferative disease or disorder. The samples may, for example, be aliquots of a single sample of normal cells obtained from a patient, pooled samples of normal cells obtained from a patient, cells of a normal cell line, aliquots of a single sample of cells from a subject associated with a hyperproliferative disease or disorder obtained from a patient, pooled samples of cells from a subject associated with a hyperproliferative disease or disorder obtained from a patient, cells of a cell line associated with a hyperproliferative disease or disorder, or the like. In one embodiment, the samples are cells obtained from a patient and a plurality of compounds known to be effective for inhibiting various hyperproliferative diseases or disorders are tested in order to identify the compound which is likely to best inhibit the hyperproliferative disease or disorder in the patient.

[0205] This method may likewise be used to assess the efficacy of a therapy for inhibiting a hyperproliferative disease or disorder in a patient. In this method, the level of expression of one or more markers of the invention in a pair of samples (one subjected to the therapy, the other not subjected to the therapy) is assessed. As with the method of assessing the efficacy of test compounds, if the therapy induces a significantly lower level of expression of a marker of the invention then the therapy is efficacious for inhibiting a hyperproliferative disease or disorder. As above, if samples from a selected patient are used in this method, then alternative therapies can be assessed in vitro in order to select a therapy most likely to be efficacious for inhibiting a hyperproliferative disease or disorder in the patient.

[0206] As described above, the disease state of human cells is correlated with changes in the levels of expression of the markers of the invention. The invention includes a method for assessing the human cell carcinogenic potential of a test compound, using, for example, an array of the invention. This method comprises maintaining separate aliquots of human cells from a subject associated with a hyperproliferative disease or disorder in the presence and absence of the test compound. Expression of a marker of the invention in each of the aliquots is compared. A significantly higher level of expression of a marker of the invention in the aliquot maintained in the presence of the test compound (relative to the aliquot maintained in the absence of the test compound) is an indication that the test compound possesses carcinogenic potential. The relative carcinogenic potentials of various test compounds can be assessed by comparing the degree of enhancement or inhibition of the level of expression of the relevant markers, by comparing the number of markers for which the level of expression is enhanced or inhibited, or by comparing both.

[0207] Various aspects of the invention are described in further detail in the following subsections.

### Nucleotide Sequences

[0208] The invention provides nucleotide sequences, e.g., nucleotide sequences as set forth in SEQ ID NO: 1-1146 (Table 6), SEQ ID NO: 3439-3445 (Table 5) and SEQ ID NO: 3453-3457 (Table 5) that encode one or more membrane proteins, a complement or fragment thereof.

[0209] One aspect of the invention pertains to isolated nucleic acid molecules or their complement, including nucleic acid molecules which encode a marker protein or a portion thereof. Isolated nucleic acid molecules of the invention also include nucleic acid molecules sufficient for use as hybridization probes to identify marker nucleic acid molecules, and fragments of marker nucleic acid molecules, e.g., those suitable for use as PCR primers for the amplification or mutation of marker nucleic acid molecules. As used herein, the term “nucleic acid molecule” is intended to include DNA molecules (e.g., cDNA or genomic DNA) and RNA molecules (e.g., mRNA) and analogs of the DNA or RNA generated using nucleotide analogs. The nucleic acid molecule can be single-stranded or double-stranded, but preferably is double-stranded DNA. The terms “nucleic acid molecule,” “polynucleotide,” and “nucleotide sequence” can be used interchangeably herein.

[0210] An “isolated” nucleic acid molecule is one which is separated from other nucleic acid molecules which are present in the natural source of the nucleic acid molecule. Preferably, an “isolated” nucleic acid molecule is free of sequences (preferably protein-encoding sequences) which naturally flank the nucleic acid (i.e., sequences located at the 5′ and 3′ ends of the nucleic acid) in the genomic DNA of the organism from which the nucleic acid is derived. For example, in various embodiments, the isolated nucleic acid molecule can contain less than about 5 kB, 4 kB, 3 kB, 2 kB, 1 kB, 0.5 kB or 0.1 kB of nucleotide sequences which naturally flank the nucleic acid molecule in genomic DNA of the cell from which the nucleic acid is derived. Moreover, an “isolated” nucleic acid molecule, such as a cDNA molecule, can be substantially free of other cellular material, or culture medium when produced by recombinant techniques, or substantially free of chemical precursors or other chemicals when chemically synthesized.

[0211] A nucleic acid molecule of the present invention can be isolated using standard molecular biology techniques and the sequence information in the database records described herein. Using all or a portion of such nucleic acid sequences, nucleic acid molecules of the invention can be isolated using standard hybridization and cloning techniques (e.g., as described in Sambrook et al., ed., Molecular Cloning: A Laboratory Manual, 2nd ed., Cold Spring Harbor Laboratory Press, Cold Spring Harbor, N.Y., 1989).

[0212] A nucleic acid molecule of the invention can be amplified using cDNA, mRNA, or genomic DNA as a template and appropriate oligonucleotide primers according to standard PCR or in vitro transcription amplification techniques. The nucleic acid so amplified can be cloned into an appropriate vector and characterized by DNA sequence analysis. Furthermore, nucleotides corresponding to all or a portion of a nucleic acid molecule of the invention can be prepared by standard synthetic techniques, e.g., using an automated DNA synthesizer.

[0213] In another embodiment, an isolated nucleic acid molecule of the invention comprises a nucleic acid molecule which has a nucleotide sequence complementary to the nucleotide sequence of a marker nucleic acid or to the nucleotide sequence of a nucleic acid encoding a marker protein. A nucleic acid molecule which is complementary to a given nucleotide sequence is one which is sufficiently complementary to the given nucleotide sequence that it can hybridize to the given nucleotide sequence thereby forming a stable duplex.

[0214] Moreover, a nucleic acid molecule of the invention can comprise only a portion of a nucleic acid sequence, wherein the full length nucleic acid sequence comprises a marker nucleic acid or which encodes a marker protein. Such nucleic acid molecules can be used, for example, as a probe or primer. The probe/primer typically is used as one or more substantially purified oligonucleotides. The oligonucleotide typically comprises a region of nucleotide sequence that hybridizes under stringent conditions to at least about 7, preferably about 15, more preferably about 25, 50, 75, 100, 125, 150, 175, 200, 250, 300, 350, or 400 or more consecutive nucleotides of a nucleic acid of the invention.

[0215] Probes based on the sequence of a nucleic acid molecule of the invention can be used to detect transcripts or genomic sequences corresponding to one or more marker proteins of the invention. The probe comprises a label group attached thereto, e.g., a radioisotope, a fluorescent compound, an enzyme, or an enzyme co-factor. Such probes can be used as part of a diagnostic test kit for identifying cells or tissues which mis-express the protein, such as by measuring levels of a nucleic acid molecule encoding the protein in a sample of cells from a subject, e.g., detecting mRNA levels or determining whether a gene encoding the protein has been mutated or deleted.

[0216] The invention further encompasses nucleic acid molecules that differ, due to degeneracy of the genetic code, from the nucleotide sequence of nucleic acid molecules encoding a marker protein (e.g., a protein having one of the amino acid sequences set forth in Table 6), and thus encode the same protein.

[0217] It will be appreciated by those skilled in the art that DNA sequence polymorphisms that lead to changes in the amino acid sequence can exist within a population (e.g., the human population). Such genetic polymorphisms can exist among individuals within a population due to natural allelic variation. An allele is one of a group of genes which occur alternatively at a given genetic locus. In addition, it will be appreciated that DNA polymorphisms that affect RNA expression levels can also exist that may affect the overall expression level of that gene (e.g., by affecting regulation or degradation).

[0218] As used herein, the phrase “allelic variant” refers to a nucleotide sequence which occurs at a given locus or to a polypeptide encoded by the nucleotide sequence.

[0219] As used herein, the terms “gene” and “recombinant gene” refer to nucleic acid molecules comprising an open reading frame encoding a polypeptide corresponding to a marker of the invention. Such natural allelic variations can typically result in 1-5% variance in the nucleotide sequence of a given gene. Alternative alleles can be identified by sequencing the gene of interest in a number of different individuals. This can be readily carried out by using hybridization probes to identify the same genetic locus in a variety of individuals. Any and all such nucleotide variations and resulting amino acid polymorphisms or variations that are the result of natural allelic variation and that do not alter the functional activity are intended to be within the scope of the invention.

[0220] In another embodiment, an isolated nucleic acid molecule of the invention is at least 7, 15, 20, 25, 30, 40, 60, 80, 100, 150, 200, 250, 300, 350, 400, 450, 550, 650, 700, 800, 900, 1000, 1200, 1400, 1600, 1800, 2000, 2200, 2400, 2600, 2800, 3000, 3500, 4000, 4500, or more nucleotides in length and hybridizes under stringent conditions to a marker nucleic acid or to a nucleic acid encoding a marker protein.

[0221] In addition to naturally-occurring allelic variants of a nucleic acid molecule of the invention that can exist in the population, the skilled artisan will further appreciate that sequence changes can be introduced by mutation thereby leading to changes in the amino acid sequence of the encoded protein, without altering the biological activity of the protein encoded thereby. For example, one can make nucleotide substitutions leading to amino acid substitutions at “non-essential” amino acid residues. A “non-essential” amino acid residue is a residue that can be altered from the wild-type sequence without altering the biological activity, whereas an “essential” amino acid residue is required for biological activity. For example, amino acid residues that are not conserved or only semi-conserved among homologs of various species may be non-essential for activity and thus would be likely targets for alteration. Alternatively, amino acid residues that are conserved among the homologs of various species (e.g., murine and human) may be essential for activity and thus would not be likely targets for alteration.

[0222] Accordingly, another aspect of the invention pertains to nucleic acid molecules encoding a variant marker protein that contain changes in amino acid residues that are not essential for activity. Such variant marker proteins differ in amino acid sequence from the naturally-occurring marker proteins, yet retain biological activity. In one embodiment, such a variant marker protein has an amino acid sequence that is at least about 40% identical, 50%, 60%, 70%, 80%, 90%, 95%, or 98% identical to the amino acid sequence of a marker protein.

[0223] An isolated nucleic acid molecule encoding a variant marker protein can be created by introducing one or more nucleotide substitutions, additions or deletions into the nucleotide sequence of marker nucleic acid molecules, such that one or more amino acid residue substitutions, additions, or deletions are introduced into the encoded protein. Mutations can be introduced by standard techniques, such as site-directed mutagenesis and PCR-mediated mutagenesis. Preferably, conservative amino acid substitutions are made at one or more predicted non-essential amino acid residues. A “conservative amino acid substitution” is one in which the amino acid residue is replaced with an amino acid residue having a similar side chain. Families of amino acid residues having similar side chains have been defined in the art. These families include amino acids with basic side chains (e.g., lysine, arginine, histidine), acidic side chains (e.g., aspartic acid, glutamic acid), uncharged polar side chains (e.g., glycine, asparagine, glutamine, serine, threonine, tyrosine, cysteine), non-polar side chains (e.g., alanine, valine, leucine, isoleucine, proline, phenylalanine, methionine, tryptophan), beta-branched side chains (e.g., threonine, valine, isoleucine) and aromatic side chains (e.g., tyrosine, phenylalanine, tryptophan, histidine). Alternatively, mutations can be introduced randomly along all or part of the coding sequence, such as by saturation mutagenesis, and the resultant mutants can be screened for biological activity to identify mutants that retain activity. Following mutagenesis, the encoded protein can be expressed recombinantly and the activity of the protein can be determined.

[0224] The present invention encompasses antisense nucleic acid molecules, i.e., molecules which are complementary to a sense nucleic acid of the invention, e.g., complementary to the coding strand of a double-stranded marker cDNA molecule or complementary to a marker mRNA sequence. Accordingly, an antisense nucleic acid of the invention can hydrogen bond to (i.e. anneal with) a sense nucleic acid of the invention. The antisense nucleic acid can be complementary to an entire coding strand, or to only a portion thereof, e.g., all or part of the protein coding region (or open reading frame). An antisense nucleic acid molecule can also be antisense to all or part of a non-coding region of the coding strand of a nucleotide sequence encoding a marker protein. The non-coding regions (“5′ and 3′ untranslated regions”) are the 5′ and 3′ sequences which flank the coding region and are not translated into amino acids.

[0225] An antisense oligonucleotide can be, for example, about 5, 10, 15, 20, 25, 30, 35, 40, 45, or 50 or more nucleotides in length. An antisense nucleic acid of the invention can be constructed using chemical synthesis and enzymatic ligation reactions using procedures known in the art. For example, an antisense nucleic acid (e.g., an antisense oligonucleotide) can be chemically synthesized using naturally occurring nucleotides or variously modified nucleotides designed to increase the biological stability of the molecules or to increase the physical stability of the duplex formed between the antisense and sense nucleic acid molecules, e.g., phosphorothioate derivatives and acridine substituted nucleotides can be used. Examples of modified nucleotides which can be used to generate the antisense nucleic acid include 5-fluorouracil, 5-bromouracil, 5-chlorouracil, 5-iodouracil, hypoxanthine, xanthine, 4-acetylcytosine, 5-(carboxyhydroxylmethyl) uracil, 5-carboxymethylaminomethyl-2-thiouridine, 5-carboxymethylaminomethyluracil, dihydrouracil, beta-D-galactosylqueosine, inosine, N-6-isopentenyladenine, 1-methylguanine, 1-methylinosine, 2,2-dimethylguanine, 2-methyladenine, 2-methylguanine, 3-methylcytosine, 5-methylcytosine, N-6-adenine, 7-methylguanine, 5-methylaminomethyluracil, 5-methoxyaminomethyl-2-thiouracil, beta-D-mannosylqueosine, 5′-methoxycarboxymethyluracil, 5-methoxyuracil, 2-methylthio-N6-isopentenyladenine, uracil-5-oxyacetic acid (v), wybutoxosine, pseudouracil, queosine, 2-thiocytosine, 5-methyl-2-thiouracil, 2-thiouracil, 4-thiouracil, 5-methyluracil, uracil-5-oxyacetic acid methylester, uracil-5-oxyacetic acid (v), 5-methyl-2-thiouracil, 3-(3-amino-3-N-2-carboxypropyl) uracil, (acp3)w, and 2,6-diaminopurine. Alternatively, the antisense nucleic acid can be produced biologically using an expression vector into which a nucleic acid has been sub-cloned in an antisense orientation (i.e., RNA transcribed from the inserted nucleic acid will be of an antisense orientation to a target nucleic acid of interest, described further in the following subsection).

[0226] The antisense nucleic acid molecules of the invention are typically administered to a subject or generated in situ such that they hybridize with or bind to cellular mRNA and/or genomic DNA encoding a marker protein to thereby inhibit expression of the marker, e.g., by inhibiting transcription and/or translation. The hybridization can be by conventional nucleotide complementarity to form a stable duplex, or, for example, in the case of an antisense nucleic acid molecule which binds to DNA duplexes, through specific interactions in the major groove of the double helix. Alternatively, antisense nucleic acid molecules can be modified to target selected cells and then administered systemically. For example, for systemic administration, antisense molecules can be modified such that they specifically bind to receptors or antigens expressed on a selected cell surface, e.g., by linking the antisense nucleic acid molecules to peptides or antibodies which bind to cell surface receptors or antigens. The antisense nucleic acid molecules can also be delivered to cells using the vectors described herein. To achieve sufficient intracellular concentrations of the antisense molecules, vector constructs in which the antisense nucleic acid molecule is placed under the control of a strong pol II or pol III promoter are preferred.

[0227] An antisense nucleic acid molecule of the invention can be an α-anomeric nucleic acid molecule. An α-anomeric nucleic acid molecule forms specific double-stranded hybrids with complementary RNA in which, contrary to the usual α-units, the strands run parallel to each other (Gaultier et al, 1987, Nucleic Acids Res. 15:6625-6641). The antisense nucleic acid molecule can also comprise a 2′-o-methylribonucleotide (Inoue et al., 1987, Nucleic Acids Res. 15:6131-6148) or a chimeric RNA-DNA analogue (Inoue et al., 1987, FEBS Lett. 215:327-330).

[0228] The invention also encompasses ribozymes. Ribozymes are catalytic RNA molecules with ribonuclease activity which are capable of cleaving a single-stranded nucleic acid, such as an mRNA, to which they have a complementary region. Thus, ribozymes (e.g., hammerhead ribozymes as described in Haselhoff and Gerlach, 1988, Nature 334:585-591) can be used to catalytically cleave mRNA transcripts to thereby inhibit translation of the protein encoded by the mRNA. A ribozyme having specificity for a nucleic acid molecule encoding a marker protein can be designed based upon the nucleotide sequence of a cDNA corresponding to the marker sequence. For example, a derivative of a Tetrahymena L-19 IVS RNA can be constructed in which the nucleotide sequence of the active site is complementary to the nucleotide sequence to be cleaved (see Cech et al. U.S. Pat. No. 4,987,071; and Cech et al. U.S. Pat. No. 5,116,742). Alternatively, an mRNA encoding a polypeptide of the invention can be used to select a catalytic RNA having a specific ribonuclease activity from a pool of RNA molecules (see, e.g., Bartel and Szostak, 1993, Science 261:1411-1418).

[0229] The invention also encompasses nucleic acid molecules which form triple helical structures. For example, expression of a marker protein of the invention can be inhibited by targeting nucleotide sequences complementary to the regulatory region of the gene encoding the marker nucleic acid or protein (e.g., the promoter and/or enhancer) to form triple helical structures that prevent transcription of the gene in target cells. See generally Helene (1991) Anticancer Drug Des. 6(6):569-84; Helene (1992) Ann. N.Y. Acad. Sci. 660:27-36; and Maher (1992) Bioassays 14(12):807-15.

[0230] In various embodiments, the nucleic acid molecules of the invention can be modified at the base moiety, sugar moiety or phosphate backbone to improve, e.g., the stability, hybridization, or solubility of the molecule. For example, the deoxyribose phosphate backbone of the nucleic acids can be modified to generate peptide nucleic acids (see Hyrup et al., 1996, Bioorganic & Medicinal Chemistry 4(1): 5-23). As used herein, the terms “peptide nucleic acids” or “PNAs” refer to nucleic acid mimics, e.g., DNA mimics, in which the deoxyribose phosphate backbone is replaced by a pseudopeptide backbone and only the four natural nucleobases are retained. The neutral backbone of PNAs has been shown to allow for specific hybridization to DNA and RNA under conditions of low ionic strength. The synthesis of PNA oligomers can be performed using standard solid phase peptide synthesis protocols as described in Hyrup et al. (1996), supra; Perry-O'Keefe et al. (1996) Proc. Natl. Acad. Sci. USA 93:14670-675.

[0231] PNAs can be used in therapeutic and diagnostic applications. For example, PNAs can be used as antisense or antigene agents for sequence-specific modulation of gene expression by, e.g., inducing transcription or translation arrest or inhibiting replication. PNAs can also be used, e.g., in the analysis of single base pair mutations in a gene by, e.g., PNA directed PCR clamping; as artificial restriction enzymes when used in combination with other enzymes, e.g., S1 nucleases (Hyrup (1996), supra; or as probes or primers for DNA sequence and hybridization (Hyrup, 1996, supra; Perry-O'Keefe et al., 1996, Proc. Natl. Acad. Sci. USA 93:14670-675).

[0232] In another embodiment, PNAs can be modified, e.g., to enhance their stability or cellular uptake, by attaching lipophilic or other helper groups to PNA, by the formation of PNA-DNA chimeras, or by the use of liposomes or other techniques of drug delivery known in the art. For example, PNA-DNA chimeras can be generated which can combine the advantageous properties of PNA and DNA. Such chimeras allow DNA recognition enzymes, e.g., RNase H and DNA polymerases, to interact with the DNA portion while the PNA portion would provide high binding affinity and specificity. PNA-DNA chimeras can be linked using linkers of appropriate lengths selected in terms of base stacking, number of bonds between the nucleobases, and orientation (Hyrup, 1996, supra). The synthesis of PNA-DNA chimeras can be performed as described in Hyrup (1996), supra, and Finn et al. (1996) Nucleic Acids Res. 24(17):3357-63. For example, a DNA chain can be synthesized on a solid support using standard phosphoramidite coupling chemistry and modified nucleoside analogs. Compounds such as 5′-(4-methoxytrityl)amino-5′-deoxy-thymidine phosphoramidite can be used as a link between the PNA and the 5′ end of DNA (Mag et al., 1989, Nucleic Acids Res. 17:5973-88). PNA monomers are then coupled in a step-wise manner to produce a chimeric molecule with a 5′ PNA segment and a 3′ DNA segment (Finn et al., 1996, Nucleic Acids Res. 24(17):3357-63). Alternatively, chimeric molecules can be synthesized with a 5′ DNA segment and a 3′ PNA segment (Peterser et al., 1975, Bioorganic Med. Chem. Lett. 5:1119-11124).

[0233] In other embodiments, the oligonucleotide can include other appended groups such as peptides (e.g., for targeting host cell receptors in vivo), or agents facilitating transport across the cell membrane (see, e.g., Letsinger et al., 1989, Proc. Natl. Acad. Sci. USA 86:6553-6556; Lemaitre et al., 1987, Proc. Natl. Acad. Sci. USA 84:648-652; PCT Publication No. WO 88/09810) or the blood-brain barrier (see, e.g., PCT Publication No. WO 89/10134). In addition, oligonucleotides can be modified with hybridization-triggered cleavage agents (see, e.g., Krol et al., 1988, Bio/Techniques 6:958-976) or intercalating agents (see, e.g., Zon, 1988, Pharm. Res. 5:539-549). To this end, the oligonucleotide can be conjugated to another molecule, e.g., a peptide, hybridization triggered cross-linking agent, transport agent, hybridization-triggered cleavage agent, etc.

[0234] The invention also includes molecular beacon nucleic acid molecules having at least one region which is complementary to a nucleic acid of the invention, such that the molecular beacon is useful for quantitating the presence of the nucleic acid of the invention in a sample. A “molecular beacon” nucleic acid is a nucleic acid comprising a pair of complementary regions and having a fluorophore and a fluorescent quencher associated therewith. The fluorophore and quencher are associated with different portions of the nucleic acid in such an orientation that when the complementary regions are annealed with one another, fluorescence of the fluorophore is quenched by the quencher. When the complementary regions of the nucleic acid are not annealed with one another, fluorescence of the fluorophore is quenched to a lesser degree. Molecular beacon nucleic acids are described, for example, in U.S. Pat. No. 5,876,930.

### Polynucleotides Encoding Membrane Associated Molecule-Specific Binding Molecules

[0235] The present invention also provides for nucleic acid molecules encoding membrane associated molecule-specific antibodies or other binding molecules (including molecules comprising, consisting essentially of, or consisting of, antibody fragments or variants thereof).

[0236] The polynucleotides may be produced or manufactured by any method known in the art. For example, if the nucleotide sequence of the antibody is known, a polynucleotide encoding the antibody may be assembled from chemically synthesized oligonucleotides (e.g., as described in Kutmeier et al., BioTechniques 17:242 (1994)), which, briefly, involves the synthesis of overlapping oligonucleotides containing portions of the sequence encoding the antibody, annealing and ligating of those oligonucleotides, and then amplification of the ligated oligonucleotides by PCR.

[0237] Alternatively, a polynucleotide encoding an antibody or other binding molecule may be generated from nucleic acid from a suitable source. If a clone containing a nucleic acid encoding a particular antibody is not available, but the sequence of the antibody molecule is known, a nucleic acid encoding the immunoglobulin may be chemically synthesized or obtained from a suitable source (e.g., an antibody cDNA library, or a cDNA library generated from, or nucleic acid, preferably poly A+RNA, isolated from, any tissue or cells expressing the antibody or other binding molecule, such as hybridoma cells selected to express an antibody) by PCR amplification using synthetic primers hybridizable to the 3′ and 5′ ends of the sequence or by cloning using an oligonucleotide probe specific for the particular gene sequence to identify, e.g., a cDNA clone from a cDNA library that encodes the antibody or other binding molecule. Amplified nucleic acids generated by PCR may then be cloned into replicable cloning vectors using any method well known in the art.

[0238] Once the nucleotide sequence and corresponding amino acid sequence of the antibody or other binding molecule is determined, its nucleotide sequence may be manipulated using methods well known in the art for the manipulation of nucleotide sequences, e.g., recombinant DNA techniques, site directed mutagenesis, PCR, etc. (see, for example, the techniques described in Sambrook et al., Molecular Cloning, A Laboratory Manual, 2d Ed., Cold Spring Harbor Laboratory, Cold Spring Harbor, N.Y. (1990) and Ausubel et al., eds., Current Protocols in Molecular Biology, John Wiley & Sons, NY (1998), which are both incorporated by reference herein in their entireties), to generate antibodies having a different amino acid sequence, for example to create amino acid substitutions, deletions, and/or insertions.

[0239] A polynucleotide encoding a membrane associated molecule-specific antibody or other binding molecule can be composed of any polyribonucleotide or polydeoxyribonucleotide, which may be unmodified RNA or DNA or modified RNA or DNA. For example, a polynucleotide encoding a membrane associated molecule-specific antibody or other binding molecule can be composed of single- and double-stranded DNA, DNA that is a mixture of single- and double-stranded regions, single- and double-stranded RNA, and RNA that is mixture of single- and double-stranded regions, hybrid molecules comprising DNA and RNA that may be single-stranded or, more typically, double-stranded or a mixture of single- and double-stranded regions. In addition, a polynucleotide encoding a membrane associated molecule-specific antibody can be composed of triple-stranded regions comprising RNA or DNA or both RNA and DNA. A polynucleotide encoding a membrane associated molecule-specific antibody or other binding molecule may also contain one or more modified bases or DNA or RNA backbones modified for stability or for other reasons. “Modified” bases include, for example, tritylated bases and unusual bases such as inosine. A variety of modifications can be made to DNA and RNA; thus, “polynucleotide” embraces chemically, enzymatically, or metabolically modified forms.

[0240] Such membrane associated molecule polynucleotides include the following polynucleotides (Table 5) and their respective nucleic acid sequences:

TABLE 5

| BI NO: | SEQ ID NO: | PROTEIN NAME |
|---|---|---|
| BI1053146 | 3439 | SDAD1 (NM_018115.1) |
| BI1053147 | 3440 | GPR101 (NM_054021) |
| BI1053148 | 3441 | |
| BI1053149 | 3442 | OFR4N4 (NM_001005241) |
| BI1053150 | 3443 | OFR2G3 (NM_001001914) |
| BI1053151 | 3444 | |
| BI1053152 | 3445 | OFR4S2 (NM_001004059) |
| BI1053153 | 3453 | MUC 4 a (NP_060876) |
| BI1053154 | 3454 | MUC 4 b (NP_612155) |
| BI1053155 | 3455 | MUC 4 c (NP_612156) |
| BI1053156 | 3456 | MUC 4 d (NP_004523) |
| BI1053157 | 3457 | MUC 4 e (NP_612154) |

SEQ ID NO: 3439

ATGTTTATGGCACAGATTAGTCACTGCTACCCAGAGTACCTAAGTA
ATTTTCCTCAAGAGGTGAAAGATCTTCTCTCCTGCAATCATACCGTA
TTGGATCCAGATCTGCGAATGACATTTTGCAAAGCTTTGATCTTGCT
GAGAAATAAGAATCTCATCAATCCATCAAGCCTGCTAGAACTCTTC
TTTGAACTTTTTCGTTGCCATGATAAACTTCTGCGAAAGACTTTATA
CACACATATTGTGACTGATATCAAGAATATAAATGCAAAACACAA
GAACAATAAAGTGAATGTAGTATTGCAAAATTTCATGTACACCATG
TTAAGAGATAGCAATGCAACCGCAGCCAAGATGTCTTTAGATGTAA
TGATTGAACTCTACAGAAGGAACATCTGGAATGATGCAAAAACTGT
CAATGTTATCACAACTGCATGTTTCTCTAAGGTCACCAAGATATTA
GTTGCCGCTTTGACATTCTTTCTTGGGAAAGATGAAGATGAAAAAC
AGGACAGTGACTCCGAATCTGAGGATGATGGACCAACAGCAAGAG
ACCTGCTAGTACAATATGCTACAGGGAAGAAAAGTTCCAAAAACA
AGAAAAAGTTGGAAAAGGCAATGAAAGTGCTCAAGAAACAAAAA
AAGAAGAAAAAACCAGAGGTGTTTAACTTTTCAGCCATTCACTTGA
TTCATGATCCCCAAGATTTTGCGGAAAAACTACTAAAGCAGCTTGA
GTGCTGTAAGGAGAGGTTTGAAGTGAAGATGATGCTCATGAACCTT
ATCTCCAGATTGGTGGGAATTCATGAGCTTTTCCTCTTCAATTTCTA
TCCCTTTTTGCAAAGGTTTCTGCAGCCCCACCAAAGAGAAGTAACC
AAGATCCTTCTGTTTGCTGCACAAGCATCTCATCACCTAGTACCCCC
AGAGATTATTCAATCATTGCTTATGACTGTGGCAAACAATTTTGTTA
CCGACAAGAACTCTGGAGAAGTCATGACAGTAGGAATCAATGCTA
TAAAGGAGATAACAGCTCGATGTCCTCTGGCCATGACTGAAGAACT
TCTCCAAGACCTGGCTCAGTATAAAACACACAAGGATAAGAATGT
AATGATGTCTGCTAGAACTTTGATTCACCTCTTCCGAACACTGAATC
CTCAGATGCTGCAGAAGAAATTCCGGGGTAAGCCTACAGAGGCCT
CCATAGAAGCAAGAGTACAAGAATATGGAGAATTAGATGCTAAAG
ATTACATTCCAGGAGCAGAAGTTCTGGAAGTTGAGAAAGAAGAGA
ATGCTGAAAATGATGAAGATGGATGGGAAAGTACCAGTCTCAGTG
AGGAGGAGGATGCTGATGGTGAATGGATTGATGTGCAACACTCTTC
CGATGAAGAACAGCAAGAAATCTCCAAGAAGCTGAACAGCATGCC
CATGGAGGAGCGGAAGGCCAAAGCTGCAGCCATCAGCACTAGCCG
AGTTTTAACTCAGGAAGACTTCCAGAAAATCCGCATGGCCCAAATG
AGAAAAGAACTTGATGCTGCCCCCGGGAAATCCCAGAAGAGGAAA
TACATTGAAATAGACAGTGATGAAGAGCCCAGGGGTGAATTACTTT
CTCTTCGGGACATTGAACGCCTTCATAAAAAGCCAAAGTCTGACAA
AGAGACAAGACTAGCAACTGCAATGGCTGGAAAGACAGACCGAAA
AGAATTTGTGAGGAAGAAAACCAAAACAAATCCATTTTCCAGTTCG
ACAAATAAAGAGAAGAAAAAACAGAAGAACTTTATGATGATGCGG
TATAGCCAGAATGTCCGGTCAAAAAATAAGCGTTCCTTCCGAGAAA
AACAGTTGGCACTACGAGATGCACTTTTGAAAAAGAGAAAAAGAA
TGAAGTAA

SEQ ID NO: 3440

ATGACGTCCA CCTGCACCAA CAGCACGCGC GAGAGTAACA
GCAGCCACAC GTGCATGCCC CTCTCCAAAA TGCCCATCAG
CCTGGCCCAC GGCATCATCCGCTCAACCGT GCTGGTTATC
TTCCTCGCCG CCTCTTTCGT CGGCAACATA GTGCTGGCGC
TAGTGTTGCA GCGCAAGCCG CAGCTGCTGC AGGTGACCAA
CCGTTTTATC TTTAACCTCC TCGTCACCGA CCTGCTGCAG
ATTTCGCTCG TGGCCCCCTG GGTGGTGGCC ACCTCTGTGC
CTCTCTTCTG GCCCCTCAAC AGCCACTTCT GCACGGCCCT
GGTTAGCCTC ACCCACCTGT TCGCCTTCGC CAGCGTCAAC
ACCATTGTCG TGGTGTCAGT GGATCGCTAC TTGTCCATCA
TCCACCCTCT CTCCTACCCG TCCAAGATGA CCCAGCGCCG
CGGTTACCTG CTCCTCTATG GCACCTGGAT TGTGGCCATC
CTGCAGAGCA CTCCTCCACT CTACGGCTGG GGCCAGGCTG
CCTTTGATGA GCGCAATGCT CTCTGCTCCA TGATCTGGGG
GGCCAGCCCC AGCTACACTA TTCTCAGCGT GGTGTCCTTC
ATCGTCATTC CACTGATTGT CATGATTGCC TGCTACTCCG
TGGTGTTCTG TGCAGCCCGG AGGCAGCATG CTCTGCTGTA
CAATGTCAAG AGACACAGCT TGGAAGTGCG AGTCAAGGAC
TGTGTGGAGA ATGAGGATGA AGAGGGAGCA GAGAAGAAGG
AGGAGTTCCA GGATGAGAGT GAGTTTCGCC GCCAGCATGA
AGGTGAGGTC AAGGCCAAGG AGGGCAGAAT GGAAGCCAAG
GACGGCAGCC TGAAGGCCAA GGAAGGAAGC ACGGGGACCA
GTGAGAGTAG TGTAGAGGCC AGGGGCAGCG AGGAGGTCAG
AGAGAGCAGC ACGGTGGCCA GCGACGGCAG CATGGAGGGT
AAGGAAGGCA GCACCAAAGT TGAGGAGAAC AGCATGAAGG
CAGACAAGGG TCGCACAGAG GTCAACCAGT GCAGCATTGA
CTTGGGTGAA GATGACATGG AGTTTGGTGA AGACGACATC
AATTTCAGTG AGGATGACGT CGAGGCAGTG AACATCCCGG
AGAGCCTCCC ACCCAGTCGT CGTAACAGCA ACAGCAACCC
TCCTCTGCCC AGGTGCTACC AGTGCAAAGC TGCTAAAGTG
ATCTTCATCA TCATTTTCTC CTATGTGCTA TCCCTGGGGC
CCTACTGCTT TTTAGCAGTC CTGGCCGTGT GGGTGGATGT
CGAAACCCAG GTACCCCAGT GGGTGATCAC CATAATCATC
TGGCTTTTCT TCCTGCAGTG CTGCATCCAC CCCTATGTCT
ATGGCTACAT GCACAAGACC ATTAAGAAGG AAATCCAGGA
CATGCTGAAG AAGTTCTTCT GCAAGGAAAA GCCCCCGAAA
GAAGATAGCC ACCCAGACCT GCCCGGAACA GAGGGTGGGA
CTGAAGGCAA GATTGTCCCT TCCTACGATT CTGCTACTTT TCCT

SEQ ID NO: 3441

ATGTTATCCCCCCACATTTACCTCCCAAAGTGCTGGAATTACAGAC
ATGAGCCACTGTGCCTGGCCGTGTGCTTTCATTTTCAGTTAAGTCTC
TGCTTTTGTTGCTTTATTCTTTCCCTGCTTTGTTTGTGTGTTTTGTTCA
ATTCTTTGTTCAAAACACCAAGAACTTGTACAGCCTCCACTGGTAA
CATATTTTGGCAAGCCAGCCAGGAGGTAATCCCAAAGTTTGGGGTT
TATTTTTCTTGTTTGTTTTTCCTGCTCCATACAGGGGAATCTCAGTCT
CTCTCTCTCTTTTCCTTTCCAACTTGGGACGGTTGGTGGGCAGCACC
TAAACACAGAGGCAACTGCAGGTTTCTGGCCGGGGCCACTCTGAA
GGACTCCTTTCTATCTTTTCCAGTTGTGGTCCCTGATCCCTACGTGT
GGCACAGCTTGGGGCGAGCTGGCATTTGTTTCAGTGACTTAAACCT
TGTTTTCTCATGC

SEQ ID NO: 3442

ATGAAGATAGCAAACAACACAGTAGTGACAGAATTTATCCTCCTTG
GTCTGACTCAGTCTCAAGATATTCAGCTCTTGGTCTTTGTGCTGATC
TTAATTTTCTACCTTATCATCCTCCCTGGAAATTTTCTCATTATTTTC
ACCATAAGGTCAGACCCTGGGCTCACAGCCCCCCTCTATTTCTTTCT
GGGCAACTTGGCCTTCCTGGATGCATCCTACTCCTTCATTGTGGCTC
CCAGGATGTTGGTGGACTTCTTCTCTGAGAAGAAGGTAATCTCCTA
CAGAGGCTGCATCACTCAGCTCTTTTTCTTGCACTTCCTTGGAGGAG
GGGAGGGATTACTCCTTGTTGTGATGGCCTTTGACCGCTACATCGC
CATCTGCCGGCCTCTGCACTGTTCAACTGTCATGAACCCTAGAGCC
TGCTATGCAATGATGTTGGCTCTGTGGCTTGGGGGTTTTGTCCACTC
CATTATCCAGGTGGTCCTCATCCTCCGCTTGCCTTTTTGTGGCCCAA
ACCAGCTGGACAACTTCTTCTGTGATGTCCGACAGGTCATCAAGCT
GGCTTGCACCGACATGTTTGTGGTGGAGCTTCTGATGGTCTTCAAC
AGTGGCCTGATGACACTCCTGTGCTTTCTGGGGCTTCTGGCTTCCTA
TGCAGTCATCCTCTGCCATGTTCGTAGGGCAGCTTCTGAAGGGAAG
AACAAGGCCATGTCCATGTGCACCACTCGTGTCATTATTATACTTCT
TATGTTTGGACCTGCTATCTTCATCTACATGTGCCCTTTCAGGGCCT
TACCAGCTGACAAGATGGTTTCTCTCTTTCACACAGTGATCTTTCCA
TTGATGAATCCTATGATTTATACCCTTCGCAACCAGGAAGTGAAAA
CTTCCATGAAGAGGTTATTGAGTCGACATGTAGTCTGTCAAGTGGA
TTTTATAATAAGAAACTGA

SEQ ID NO: 3443

ATGGGATTGGGCAATGAGAGTTCCCTAATGGATTTCATCCTTCTAG
GCTTCTCAGACCACCCTCGTCTGGAGGCTGTTCTCTTTGTATTTGTC
CTTTTCTTCTACCTCCTGACCCTTGTGGGAAACTTCACCATAATCAT
CATCTCATATCTGGATCCCCCTCTTCATACCCCAATGTACTTTTTTCT
CAGCAACCTCTCTTTACTGGACATCTGCTTCACTACTAGCCTTGCTC
CTCAGACCTTAGTTAACTTGCAAAGACCAAAGAAGACGATCACTTA
CGGTGGTTGTGTGGCGCAACTCTATATTTCTCTGGCACTGGGCTCCA
CTGAATGTATCCTCTTGGCTGACATGGCCTTGGATCGGTACATTGCT
GTCTGCAAACCCCTCCACTATGTAGTCATCATGAACCCACGGCTTT
GCCAACAGCTGGCATCTATCTCCTGGCTCAGTGGTTTGGCTAGTTCC
CTAATCCATGCAACTTTTACCTTGCAATTGCCTCTCTGTGGCAACCA
TAGGCTGGACCATTTTATTTGCGAAGTACCAGCTCTTCTCAAGTTGG
CTTGTGTGGACACCACTGTCAATGAATTGGTGCTTTTTGTTGTTAGT
GTTCTGTTTGTTGTCATTCCACCAGCACTCATCTCCATCTCCTATGG
CTTCATAACTCAAGCTGTGCTGAGGATCAAATCAGTAGAGGCAAGG
CACAAAGCCTTCAGCACCTGCTCCTCCCACCTTACAGTGGTGATTA
TATTCTATGGCACCATAATCTACGTGTACCTGCAACCTAGTGACAG
CTATGCCCAGGACCAAGGGAAGTTTATCTCCCTCTTCTACACCATG
GTGACCCCCACTTTAAATCCTATCATCTATACTTTAAGGAACAAGG
ATATGAAAGAGGCTCTGAGGAAACTTCTCTCGGGAAAATTGTGA

SEQ ID NO: 3444

ATGCTGGACCTGGAGAAGGAGAAGGACCTGTTCAGCAGGCAGAAG
GGCTACCTGGAAGAGGAGCTCGACTACCGGAAGCAAGCCCTTGAC
CAGGCTTACCTGAAAATCCAAGACCTGGAGGCCACACTGTACACA
GCGCTGCAGCAGGAGCCGGGGCGGAGGGCCGGTGAGGCGCTGAGC
GAGGGCCAGCGGGAGGACCTGCAGGCTGCTGTGGAAAAGGTGCGC
AGGCAGATCCTCAGGCAGAGCCGCGAGTTCGACAGCCAGATCCTG
CGGGAGCGCATGGAGCTGCTGCAGCAGGCCCAGCAGAGAATCCGA
GAACTGGAGGACAAACTGGAGTTTCAGAAGCGGCACCTGAAAGAA
CTGGAGGAAAAGTTTTTGTTCCTTTTTTTGTTTTTCTCACTAGCATTC
ATTCTGTGGCCTTGA

[0241] The open reading frame (ORE) for SEQ ID NO:3444 was predicted as follows. The human transcript for SEQ ID NO:3444 identified from Ensembl database (version 32) has the same 3′ end as a homologous Rat gene XM_{—}341232 but is lacking an ATG start codon at the 5′ end. Using the 5′ end of the rat sequence and its ATG start site as a model, a predicted exon structure was generated from the corresponding human genomic region. The resulting predicted human ORF has a single transmembrane domain.

SEQ ID NO: 3445

ATGGAAAAAATAAACAACGTAACTGAATTCATTTTCTGGGGTCTTT
CTCAGAGCCCAGAGATTGAGAAAGTTTGTTTTGTGGTGTTTTCTTTC
TTCTACATAATCATTCTTCTGGGAAATCTCCTCATCATGCTGACAGT
TTGCCTGAGCAACCTGTTTAAGTCACCCATGTATTTCTTTCTCAGCT
TCTTGTCTTTTGTGGACATTTGTTACTCTTCAGTCACAGCTCCCAAG
ATGATTGTTGACCTGTTAGCAAAGGACAAAACCATCTCCTATGTGG
GGTGCATGTTGCAACTGCTTGGAGTACATTTCTTTGGTTGCACTGAG
ATCTTCATCCTTACTGTAATGGCCTATGATCGTTATGTGGCTATCTG
TAAACCCCTACATTATATGACCATCATGAACCGGGAGACATGCAAT
AAAATGTTATTAGGGACGTGGGTAGGTGGGTTCTTACACTCCATTA
TCCAAGTGGCTCTGGTAGTCCAACTACCCTTTTGTGGACCCAATGA
GATAGATCACTACTTTTGTGATGTTCACCCTGTGTTGAAACTTGCCT
GCACAGAAACATACATTGTTGGTGTTGTTGTGACAGCCAACAGTGG
TACCATTGCTCTGGGGAGTTTTGTTATCTTGCTAATCTCCTACAGCA
TCATCCTAGTTTCCCTGAGAAAGCAGTCAGCAGAAGGCAGGCGCA
AAGCCCTCTCCACCTGTGGCTCCCACATTGCCATGGTCGTTATCTTT
TTCGGCCCCTGTACTTTTATGTACATGCGCCCTGATACGACCTTTTC
AGAGGATAAGATGGTGGCTGTATTTTACACCATTATCACTCCCATG
TTAAATCCTCTGATTTATACACTGAGAAATGCAGAAGTAAAGAATG
CAATGAAGAAACTGTGGGGCAGAAATGTTTTCTTGGAGGCTAAAG
GGAAATAG
SEQ ID NO: 3453
TACAGCCCCAAGGTCGCTCCCTCTGGGGCCCTTTCTTCCCCATTCTT
CCCAGCAGCCCAAAGCTCTGGTGGGACAGGGGCAGCCCCTGGGGA
GGGAGGAGAGGACCCAGGAACCCGGCTAGGAGGGTGGCCCACCCA
TTTCCAGTGTGACCTGTTCCCATTCCCCCATGTCTCCTCCCATCCCT
CCCGCCACTCAGCTCAGGCTGATGAGAAGCAGAGCAACGGGTGTA
TCGGTGTTTTCTTTCCTGGTGGGGTAGTGGGGTGGGGCTGAGGAGA
GAAAAGGGTGATTAGCGTGGGGCCCCGCCCTCTTTTGTCCTCTTCC
CAGGTTCCCTGGCCCCTTCGGAGAAACGCACTTGGTTCGGGCCAGC
CGCCTGAGGGGACGGGCTCACGTCTGCTCCTCACACTGCAGCTGCT
GGGCCGTGGAGCTTCCCCAGGGAGCCAGGGGGACTTTTGCCGCAG
CCATGAAGGGGGCACGCTGGAGGAGGGTCCCCTGGGTGTCCCTGA
GCTGCCTGTGTCTCTGCCTCCTTCCGCATGTGGTCCCAGGAACCACA
GAGGACACATTAATAACTGGAAGTAAAACTCCTGCCCCAGTCACCT
CAACAGGCTCAACAACAGCGACACTAGAGGGACAATCAACTGCAG
CTTCTTCAAGGACCTCTAATCAGGACATATCAGCTTCATCTCAGAA
CCACCAGACTAAGAGCACGGAGACCACCAGCAAAGCTCAAACCGA
CACCCTCACGCAGATGATGACATCAACTCTTTTTTCTTCCCCAAGTG
TACACAATGTGATGGAGACTGTTACGCAGGAGACAGCTCCTCCAGA
TGAAATGACCACATCATTTCCCTCCAGTGTCACCAACACACTCATG
ATGACATCAAAGACTATAACAATGACAACCTCCACAGACTCCACTC
TTGGAAACACAGAAGAGACATCAACAGCAGGAACTGAAAGTTCTA
CCCCAGTGACCTCAGCAGTCTCAATAACAGCTGGACAGGAAGGAC
AATCACGAACAACTTCCTGGAGGACCTCTATCCAAGACACATCAGC
TTCTTCTCAGAACCACTGGACTCGGAGCACGCAGACCACCAGGGAA
TCTCAAACCAGCACCCTAACACACAGAACCACTTCAACTCCTTCTT
TCTCTCCAAGTGTACACAATGTGACAGGGACTGTTTCTCAGAAGAC
ATCTCCTTCAGGTGAAACAGCTACCTCATCCCTCTGTAGTGTCACA
AACACATCCATGATGACATCAGAGAAGATAACAGTGACAACCTCC
ACAGGCTCCACTCTTGGAAACCCAGGGGAGACATCATCAGTACCTG
TTACTGGAAGTCTTATGCCAGTCACCTCAGCAGCCTTAGTAACAGT
TGATCCAGAAGGACAATCACCAGCAACTTTCTCAAGGACTTCTACT
CAGGACACAACAGCTTTTTCTAAGAACCACCAGACTCAGAGCGTGG
AGACCACCAGAGTATCTCAAATCAACACCCTCAACACCCTCACACC
GGTTACAACATCAACTGTTTTATCCTCACCAAGTGGATTCAACCCA
AGTGGAACAGTTTCTCAGGAGACATTCCCTTCTGGTGAAACAACCA
TCTCATCCCCTTCCAGTGTCAGCAATACATTCCTGGTAACATCAAA
GGTGTTCAGAATGCCAATCTCCAGAGACTCTACTCTTGGAAACACA
GAGGAGACATCACTATCTGTAAGTGGAACCATTTCTGCAATCACTT
CCAAAGTTTCAACCATATGGTGGTCAGACACTCTGTCAACAGCACT
CTCCCCCAGTTCTCTACCTCCAAAAATATCCACAGCTTTCCACACCC
AGCAGAGTGAAGGTGCAGAGACCACAGGACGGCCTCATGAGAGGA
GCTCATTCTCTCCAGGTGTGTCTCAAGAAATATTTACTCTACATGAA
ACAACAACATGGCCTTCCTCATTCTCCAGCAAAGGCCACACAACTT
GGTCACAAACAGAACTGCCCTCAACATCAACAGGTGCTGCCACTAG
GCTTGTCACAGGAAATCCATCTACAGGGGCAGCTGGCACTATTCCA
AGGGTCCCCTCTAAGGTCTCAGCAATAGGGGAACCAGGAGAGCCC
ACCACATACTCCTCCCACAGCACAACTCTCCCAAAAACAACAGGGG
CAGGCGCCCAGACACAATGGACACAAGAAACGGGGACCACTGGAG
AGGCTCTTCTCAGCAGCCCAAGCTACAGTGTGACTCAGATGATAAA
AACGGCCACATCCCCATCTTCTTCACCTATGCTGGATAGACACACA
TCACAACAAATTACAACGGCACCATCAACAAATCATTCAACAATAC
ATTCCACAAGCACCTCTCCTCAGGAATCACCAGCTGTTTCCCAAAG
GGGTCACACTCAAGCCCCGCAGACCACACAAGAATCACAAACCAC
GAGGTCCGTCTCCCCCATGACTGACACCAAGACAGTCACCACCCCA
GGTTCTTCCTTCACAGCCAGTGGGCACTCGCCCTCAGAAATTGTTCC
TCAGGACGCACCCACCATAAGTGCAGCAACAACCTTTGCCCCAGCT
CCCACCGGGGATGGTCACACAACCCAGGCCCCGACCACAGCACTG
CAGGCAGCACCCAGCAGCCATGATGCCACCCTGGGGCCCTCAGGA
GGCACGTCACTTTCCAAAACAGGTGCCCTTACTCTGGCCAACTCTG
TAGTGTCAACACCAGGGGGCCCAGAAGGACAATGGACATCAGCCT
CTGCCAGCACCTCACCTGACACAGCAGCAGCCATGACCCATACCCA
CCAGGCTGAGAGCACAGAGGCCTCTGGACAAACACAGACCAGCGA
ACCGGCCTCCTCAGGGTCACGAACCACCTCAGCGGGCACAGCTACC
CCTTCCTCATCCGGGGCGAGTGGCACAACACCTTCAGGAAGCGAAG
GAATATCCACCTCAGGAGAGACGACAAGGTTTTCATCAAACCCCTC
CAGGGACAGTCACACAACCCAGTCAACAACCGAATTGCTGTCCGCC
TCAGCCAGTCATGGTGCCATCCCAGTAAGCACAGGAATGGCGTCTT
CGATCGTCCCCGGCACCTTTCATCCCACCCTCTCTGAGGCCTCCACT
GCAGGGAGACCGACAGGACAGTCAAGCCCAACTTCTCCCAGTGCC
TCTCCTCAGGAGACAGCCGCCATTTCCCGGATGGCCCAGACTCAGA
GGACAAGAACCAGCAGAGGGTCTGACACTATCAGCCTGGCGTCCC
AGGCAACCGACACCTTCTCAACAGTCCCACCCACACCTCCATCGAT
CACATCCAGTGGGCTTACATCTCCACAAACCCAGACCCACACTCTG
TCACCTTCAGGGTCTGGTAAAACCTTCACCACGGCCCTCATCAGCA
ACGCCACCCCTCTTCCTGTCACCAGCACCTCCTCAGCCTCCACAGGT
CACGCCACCCCTCTTGCTGTCAGCAGTGCTACCTCAGCTTCCACAGT
ATCCTCGGACTCCCCTCTGAAGATGGAAACATCAGGAATGACAACA
CCGTCACTGAAGACAGACGGTGGGAGACGCACAGCCACATCACCA
CCCCCCACAACCTCCCAGACCATCATTTCCACCATTCCCAGCACTG
CCATGCACACCCGCTCCACAGCTGCCCCCATCCCCATCCTGCCTGA
GAGAGGAGTTTCCCTCTTCCCCTATGGGGCAGACGCCGGGGACCTG
GAGTTCGTCAGGAGGACCGTGGACTTCACCTCCCCACTCTTCAAGC
CGGCGACTGGCTTCCCCCTTGGCTCCTCTCTCCGTGATTCCCTCTAC
TTCACAGACAATGGCCAGATCATCTTCCCAGAGTCAGACTACCAGA
TTTTCTCCTACCCCAACCCACTCCCAACAGGCTTCACAGGCCGGGA
CCCTGTGGCCCTGGTGGCTCCGTTCTGGGACGATGCTGACTTCTCCA
CTGGTCGGGGGACCACATTTTATCAGGAATACGAGACGTTCTATGG
TGAACACAGCCTGCTAGTCCAGCAGGCCGAGTCTTGGATTAGAAAG
ATCACAAACAACGGGGGCTACAAGGCCAGGTGGGCCCTAAAGGTC
ACGTGGGTCAATGCCCACGCCTATCCTGCCCAGTGGACCCTCGGGA
GCAACACCTACCAAGCCATCCTCTCCACGGACGGGAGCAGGTCCTA
TGCCCTGTTTCTCTACCAGAGCGGTGGGATGCAGTGGGACGTGGCC
CAGCGCTCAGGCAAGCCGGTGCTCATGGGCTTCTCTAGTGGAGATG
GCTTTTTCGAAAACAGCCCACTGATGTCCCAGCCAGTGTGGGAGAG
GTATCGCCCTGATAGATTCCTGAATTCCAACTCAGGCCTCCAAGGG
CTGCAGTTCTACGGGCTACACCGGGAAGAAAGGCCCAACTACCGTC
TCGAGTGCCTGCAGTGGCTGAAGAGCCAGCCTCGGTGGCCCAGCTG
GGGCTGGAACCAGGTCTCCTGCCCTTGTTCCTGGCAGCAGGGACGA
CGGGACTTACGATTCCAACCCGTCAGCATAGGTCGCTGGGGCCTCG
GCAGTAGGCAGCTGTGCAGCTTCACCTCTTGGCGAGGAGGCGTGTG
CTGCAGCTACGGGCCCTGGGGAGAGTTTCGTGAAGGCTGGCACGTG
CAGCGTCCTTGGCAGTTGGCCCAGGAACTGGAGCCACAGAGCTGGT
GCTGCCGCTGGAATGACAAGCCCTACCTCTGTGCCCTGTACCAGCA
GAGGCGGCCCCACGTGGGCTGTGCTACATACAGGCCCCCACAGCCC
GCCTGGATGTTCGGGGACCCCCACATCACCACCTTGGATGGTGTCA
GTTACACCTTCAATGGGCTGGGGGACTTCCTGCTGGTCGGGGCCCA
AGACGGGAACTCCTCCTTCCTGCTTCAGGGCCGCACCGCCCAGACT
GGCTCAGCCCAGGCCACCAACTTCATCGCCTTTGCGGCTCAGTACC
GCTCCAGCAGCCTGGGCCCCGTCACGGTCCAATGGCTCCTTGAGCC
TCACGACGCAATCCGTGTCCTGCTGGATAACCAGACTGTGACATTT
CAGCCTGACCATGAAGACGGCGGAGGCCAGGAGACGTTCAACGCC
ACCGGAGTCCTCCTGAGCCGCAACGGCTCTGAGGCCTCCGCCAGCT
TCGACGGCTGGGCCACCGTCTCGGTGATCGCGCTCTCCAACATCCT
CCACTCCTCCGCCAGCCTCCCGCCCGAGTACCAGAACCGCACGGAG
GGGCTCCTGGGGGTCTGGAATAACAATCCAGAGGACGACTTCAGG
ATGCCCAATGGCTCCACCATTCCCCCAGGGAGCCCTGAGGAGATGC
TTTTCCACTTTGGAATGACCTGGCAGATCAACGGGACAGGCCTCCT
TGGCAAGAGGAATGACCAGCTGCCTTCCAACTTCACCCCTGTTTTC
TACTCACAACTGCAAAAAAACAGCTCCTGGGCTGAACATTTGATCT
CCAACTGTGACGGAGATAGCTCATGCATCTATGACACCCTGGCCCT
GCGCAACGCAAGCATCGGACTTCACACGAGGGAAGTCAGTAAAAA
CTACGAGCAGGCGAACGCCACCCTCAATCAGTACCCGCCCTCCATC
AATGGTGGTCGTGTGATTGAAGCCTACAAGGGGCAGACCACGCTG
ATTCAGTACACCAGCAATGCTGAGGATGCCAACTTCACGCTCAGAG
ACAGCTGCACCGACTTGGAGCTCTTTGAGAATGGGACGTTGCTGTG
GACACCCAAGTCGCTGGAGCCATTCACTCTGGAGATTCTAGCAAGA
AGTGCCAAGATTGGCTTGGCATCTGCACTCCAGCCCAGGACTGTGG
TCTGCCATTGCAATGCAGAGAGCCAGTGTTTGTACAATCAGACCAG
CAGGGTGGGCAACTCCTCCCTGGAGGTGGCTGGCTGCAAGTGTGAC
GGGGGCACCTTCGGCCGCTACTGCGAGGGCTCCGAGGATGCCTGTG
AGGAGCCGTGCTTCCCGAGTGTCCACTGCGTTCCTGGGAAGGGCTG
CGAGGCCTGCCCTCCAAACCTGACTGGGGATGGGCGGCACTGTGCG
GCTCTGGGGAGCTCTTTCCTGTGTCAGAACCAGTCCTGCCCTGTGA
ATTACTGCTACAATCAAGGCCACTGCTACATCTCCCAGACTCTGGG
CTGTCAGCCCATGTGCACCTGCCCCCCAGCCTTCACTGACAGCCGC
TGCTTCCTGGCTGGGAACAACTTCAGTCCAACTGTCAACCTAGAAC
TTCCCTTAAGAGTCATCCAGCTCTTGCTCAGTGAAGAGGAAAATGC
CTCCATGGCAGAGGTCAACGCCTCGGTGGCATACAGACTGGGGAC
CCTGGACATGCGGGCCTTTCTCCGCAACAGCCAAGTGGAACGAATC
GATTCTGCAGCACCGGCCTCGGGAAGCCCCATCCAACACTGGATGG
TCATCTCGGAGTTCCAGTACCGCCCTCGGGGCCCGGTCATTGACTT
CCTGAACAACCAGCTGCTGGCCGCGGTGGTGGAGGCGTTCTTATAC
CACGTTCCACGGAGGAGTGAGGAGCCCAGGAACGACGTGGTCTTC
CAGCCCATTTCCGGGGAAGACGTGCGCGATGTGACAGCCCTGAAC
GTGAGCACGCTGAAGGCTTACTTCAGATGCGATGGCTACAAGGGCT
ACGACCTGGTCTACAGCCCCCAGAGCGGCTTCACCTGCGTGTCCCC
GTGCAGTAGGGGCTACTGTGACCATGGAGGCCAGTGCCAGCACCT
GCCCAGTGGGCCCCGCTGCAGCTGTGTGTCCTTCTCCATCTACACG
GCCTGGGGCGAGCACTGTGAGCACCTGAGCATGAAACTCGACGCG
TTCTTCGGCATCTTCTTTGGGGCCCTGGGCGGCCTCTTGCTGCTGGG
GGTCGGGACGTTCGTGGTCCTGCGCTTCTGGGGTTGCTCCGGGGCC
AGGTTCTCCTATTTCCTGAACTCAGCTGAGGCCTTGCCTTGAAGGG
GCAGCTGTGGCCTAGGCTACCTCAAGACTCACCTCATCCTTACCGC
ACATTTAAGGCGCCATTGCTTTTGGGAGACTGGAAAAGGGAAGGT
GACTGAAGGCTGTCAGGATTCTTCAAGGAGAATGAATACTGGGAA
TCAAGACAAGACTATACCTTATCCATAGGCGCAGGTGCACAGGGG
GAGGCCATAAAGATCAAACATGCATGGATGGGTCCTCACGCAGAC
ACACCCACAGAAGGACACTAGCCTGTGCACGCGCGCGTGCACACA
CACACACACACACACGAGTTCATAATGTGGTGATGGCCCTAAGTTA
AGCAAAATGCTTCTGCACACAAAACTCTCTGGTTTACTTCAAATTA
ACTCTATTTAAATAAAGTCTCTCTGACTTTTTGTGTCTCC

SEQ ID NO: 3454

TACAGCCCCAAGGTCGCTCCCTCTGGGGCCCTTTCTTCCCCATTCTT
CCCAGCAGCCCAAAGCTCTGGTGGGACAGGGGCAGCCCCTGGGGA
GGGAGGAGAGGACCCAGGAACCCGGCTAGGAGGGTGGCCCACCCA
TTTCCAGTGTGACCTGTTCCCATTCCCCCATGTCTCCTCCCATCCCT
CCCGCCACTCAGCTCAGGCTGATGAGAAGCAGAGCAACGGGTGTA
TCGGTGTTTTCTTTCCTGGTGGGGTAGTGGGGTGGGGCTGAGGAGA
GAAAAGGGTGATTAGCGTGGGGCCCCGCCCTCTTTTGTCCTCTTCC
CAGGTTCCCTGGCCCCTTCGGAGAAACGCACTTGGTTCGGGCCAGC
CGCCTGAGGGGACGGGCTCACGTCTGCTCCTCACACTGCAGCTGCT
GGGCCGTGGAGCTTCCCCAGGGAGCCAGGGGGACTTTTGCCGCAG
CCATGAAGGGGGCACGCTGGAGGAGGGTCCCCTGGGTGTCCCTGA
GCTGCCTGTGTCTCTGCCTCCTTCCGCATGTGGTCCCAGGAACCACA
GAGGACACATTAATAACTGGAAGTAAAACTCCTGCCCCAGTCACCT
CAACAGGCTCAACAACAGCGACACTAGAGGGACAATCAACTGCAG
CTTCTTCAAGGACCTCTAATCAGGACATATCAGCTTCATCTCAGAA
CCACCAGACTAAGAGCACGGAGACCACCAGCAAAGCTCAAACCGA
CACCCTCACGCAGATGATGACATCAACTCTTTTTTCTTCCCCAAGTG
TACACAATGTGATGGAGACTGTTACGCAGGAGACAGCTCCTCCAGA
TGAAATGACCACATCATTTCCCTCCAGTGTCACCAACACACTCATG
ATGACATCAAAGACTATAACAATGACAACCTCCACAGACTCCACTC
TTGGAAACACAGAAGAGACATCAACAGCAGGAACTGAAAGTTCTA
CCCCAGTGACCTCAGCAGTCTCAATAACAGCTGGACAGGAAGGAC
AATCACGAACAACTTCCTGGAGGACCTCTATCCAAGACACATCAGC
TTCTTCTCAGAACCACTGGACTCGGAGCACGCAGACCACCAGGGAA
TCTCAAACCAGCACCCTAACACACAGAACCACTTCAACTCCTTCTT
TCTCTCCAAGTGTACACAATGTGACAGGGACTGTTTCTCAGAAGAC
ATCTCCTTCAGGTGAAACAGCTACCTCATCCCTCTGTAGTGTCACA
AACACATCCATGATGACATCAGAGAAGATAACAGTGACAACCTCC
ACAGGCTCCACTCTTGGAAACCCAGGGGAGACATCATCAGTACCTG
TTACTGGAAGTCTTATGCCAGTCACCTCAGCAGCCTTAGTAACAGT
TGATCCAGAAGGACAATCACCAGCAACTTTCTCAAGGACTTCTACT
CAGGACACAACAGCTTTTTCTAAGAACCACCAGACTCAGAGCGTGG
AGACCACCAGAGTATCTCAAATCAACACCCTCAACACCCTCACACC
GGTTACAACATCAACTGTTTTATCCTCACCAAGTGGATTCAACCCA
AGTGGAACAGTTTCTCAGGAGACATTCCCTTCTGGTGAAACAACCA
TCTCATCCCCTTCCAGTGTCAGCAATACATTCCTGGTAACATCAAA
GGTGTTCAGAATGCCAATCTCCAGAGACTCTACTCTTGGAAACACA
GAGGAGACATCACTATCTGTAAGTGGAACCATTTCTGCAATCACTT
CCAAAGTTTCAACCATATGGTGGTCAGACACTCTGTCAACAGCACT
CTCCCCCAGTTCTCTACCTCCAAAAATATCCACAGCTTTCCACACCC
AGCAGAGTGAAGGTGCAGAGACCACAGGACGGCCTCATGAGAGGA
GCTCATTCTCTCCAGGTGTGTCTCAAGAAATATTTACTCTACATGAA
ACAACAACATGGCCTTCCTCATTCTCCAGCAAAGGCCACACAACTT
GGTCACAAACAGAACTGCCCTCAACATCAACAGGTGCTGCCACTAG
GCTTGTCACAGGAAATCCATCTACAGGGGCAGCTGGCACTATTCCA
AGGGTCCCCTCTAAGGTCTCAGCAATAGGGGAACCAGGAGAGCCC
ACCACATACTCCTCCCACAGCACAACTCTCCCAAAAACAACAGGGG
CAGGCGCCCAGACACAATGGACACAAGAAACGGGGACCACTGGAG
AGGCTCTTCTCAGCAGCCCAAGCTACAGTGTGACTCAGATGATAAA
AACGGCCACATCCCCATCTTCTTCACCTATGCTGGATAGACACACA
TCACAACAAATTACAACGGCACCATCAACAAATCATTCAACAATAC
ATTCCACAAGCACCTCTCCTCAGGAATCACCAGCTGTTTCCCAAAG
GGGTCACACTCAAGCCCCGCAGACCACACAAGAATCACAAACCAC
GAGGTCCGTCTCCCCCATGACTGACACCAAGACAGTCACCACCCCA
GGTTCTTCCTTCACAGCCAGTGGGCACTCGCCCTCAGAAATTGTTCC
TCAGGACGCACCCACCATAAGTGCAGCAACAACCTTTGCCCCAGCT
CCCACCGGGGATGGTCACACAACCCAGGCCCCGACCACAGCACTG
CAGGCAGCACCCAGCAGCCATGATGCCACCCTGGGGCCCTCAGGA
GGCACGTCACTTTCCAAAACAGGTGCCCTTACTCTGGCCAACTCTG
TAGTGTCAACACCAGGGGGCCCAGAAGGACAATGGACATCAGCCT
CTGCCAGCACCTCACCTGACACAGCAGCAGCCATGACCCATACCCA
CCAGGCTGAGAGCACAGAGGCCTCTGGACAAACACAGACCAGCGA
ACCGGCCTCCTCAGGGTCACGAACCACCTCAGCGGGCACAGCTACC
CCTTCCTCATCCGGGGCGAGTGGCACAACACCTTCAGGAAGCGAAG
GAATATCCACCTCAGGAGAGACGACAAGGTTTTCATCAAACCCCTC
CAGGGACAGTCACACAACCCAGTCAACAACCGAATTGCTGTCCGCC
TCAGCCAGTCATGGTGCCATCCCAGTAAGCACAGGAATGGCGTCTT
CGATCGTCCCCGGCACCTTTCATCCCACCCTCTCTGAGGCCTCCACT
GCAGGGAGACCGACAGGACAGTCAAGCCCAACTTCTCCCAGTGCC
TCTCCTCAGGAGACAGCCGCCATTTCCCGGATGGCCCAGACTCAGA
GGACAAGAACCAGCAGAGGGTCTGACACTATCAGCCTGGCGTCCC
AGGCAACCGACACCTTCTCAACAGTCCCACCCACACCTCCATCGAT
CACATCCAGTGGGCTTACATCTCCACAAACCCAGACCCACACTCTG
TCACCTTCAGGGTCTGGTAAAACCTTCACCACGGCCCTCATCAGCA
ACGCCACCCCTCTTCCTGTCACCAGCACCTCCTCAGCCTCCACAGGT
CACGCCACCCCTCTTGCTGTCAGCAGTGCTACCTCAGCTTCCACAGT
ATCCTCGGACTCCCCTCTGAAGATGGAAACATCAGGAATGACAACA
CCGTCACTGAAGACAGACGGTGGGAGACGCACAGCCACATCACCA
CCCCCCACAACCTCCCAGACCATCATTTCCACCATTCCCAGCACTG
CCATGCACACCCGCTCCACAGCTGCCCCCATCCCCATCCTGCCTGA
GAGAGGAGTTTCCCTCTTCCCCTATGGGGCAGACGCCGGGGACCTG
GAGTTCGTCAGGAGGACCGTGGACTTCACCTCCCCACTCTTCAAGC
CGGCGACTGGCTTCCCCCTTGGCTCCTCTCTCCGTGATTCCCTCTAC
TTCACAGACAATGGCCAGATCATCTTCCCAGAGTCAGACTACCAGA
TTTTCTCCTACCCCAACCCACTCCCAACAGGCTTCACAGGCCGGGA
CCCTGTGGCCCTGGTGGCTCCGTTCTGGGACGATGCTGACTTCTCCA
CTGGTCGGGGGACCACATTTTATCAGGAATACGAGACGTTCTATGG
TGAACACAGCCTGCTAGTCCAGCAGGCCGAGTCTTGGATTAGAAAG
ATCACAAACAACGGGGGCTACAAGGCCAGGTGGGCCCTAAAGGTC
ACGTGGGTCAATGCCCACGCCTATCCTGCCCAGTGGACCCTCGGGA
GCAACACCTACCAAGCCATCCTCTCCACGGACGGGAGCAGGTCCTA
TGCCCTGTTTCTCTACCAGAGCGGTGGGATGCAGTGGGACGTGGCC
CAGCTCTAGTGGAGATGGCTTTTTCGAAAACAGCCCACTGATGTCC
CAGCCAGTGTGGGAGAGGTATCGCCCTGATAGATTCCTGAATTCCA
ACTCAGGCCTCCAAGGGCTGCAGTTCTACGGGCTACACCGGGAAG
AAAGGCCCAACTACCGTCTCGAGTGCCTGCAGTGGCTGAAGAGCC
AGCCTCGGTGGCCCAGCTGGGGCTGGAACCAGGTCTCCTGCCCTTG
TTCCTGGCAGCAGGGACGACGGGACTTACGATTCCAACCCGTCAGC
ATAGGTCGCTGGGGCCTCGGCAGTAGGCAGCTGTGCAGCTTCACCT
CTTGGCGAGGAGGCGTGTGCTGCAGCTACGGGCCCTGGGGAGAGT
TTCGTGAAGGCTGGCACGTGCAGCGTCCTTGGCAGTTGGCCCAGGA
ACTGGAGCCACAGAGCTGGTGCTGCCGCTGGAATGACAAGCCCTA
CCTCTGTGCCCTGTACCAGCAGAGGCGGCCCCACGTGGGCTGTGCT
ACATACAGGCCCCCACAGCCCGCCTGGATGTTCGGGGACCCCCACA
TCACCACCTTGGATGGTGTCAGTTACACCTTCAATGGGCTGGGGGA
CTTCCTGCTGGTCGGGGCCCAAGACGGGAACTCCTCCTTCCTGCTTC
AGGGCCGCACCGCCCAGACTGGCTCAGCCCAGGCCACCAACTTCAT
CGCCTTTGCGGCTCAGTACCGCTCCAGCAGCCTGGGCCCCGTCACG
GTCCAATGGCTCCTTGAGCCTCACGACGCAATCCGTGTCCTGCTGG
ATAACCAGACTGTGACATTTCAGCCTGACCATGAAGACGGCGGAG
GCCAGGAGACGTTCAACGCCACCGGAGTCCTCCTGAGCCGCAACG
GCTCTGAGGCCTCCGCCAGCTTCGACGGCTGGGCCACCGTCTCGGT
GATCGCGCTCTCCAACATCCTCCACTCCTCCGCCAGCCTCCCGCCCG
AGTACCAGAACCGCACGGAGGGGCTCCTGGGGGTCTGGAATAACA
ATCCAGAGGACGACTTCAGGATGCCCAATGGCTCCACCATTCCCCC
AGGGAGCCCTGAGGAGATGCTTTTCCACTTTGGAATGACCTGGCAG
ATCAACGGGACAGGCCTCCTTGGCAAGAGGAATGACCAGCTGCCTT
CCAACTTCACCCCTGTTTTCTACTCACAACTGCAAAAAAACAGCTC
CTGGGCTGAACATTTGATCTCCAACTGTGACGGAGATAGCTCATGC
ATCTATGACACCCTGGCCCTGCGCAACGCAAGCATCGGACTTCACA
CGAGGGAAGTCAGTAAAAACTACGAGCAGGCGAACGCCACCCTCA
ATCAGTACCCGCCCTCCATCAATGGTGGTCGTGTGATTGAAGCCTA
CAAGGGGCAGACCACGCTGATTCAGTACACCAGCAATGCTGAGGA
TGCCAACTTCACGCTCAGAGACAGCTGCACCGACTTGGAGCTCTTT
GAGAATGGGACGTTGCTGTGGACACCCAAGTCGCTGGAGCCATTCA
CTCTGGAGATTCTAGCAAGAAGTGCCAAGATTGGCTTGGCATCTGC
ACTCCAGCCCAGGACTGTGGTCTGCCATTGCAATGCAGAGAGCCAG
TGTTTGTACAATCAGACCAGCAGGGTGGGCAACTCCTCCCTGGAGG
TGGCTGGCTGCAAGTGTGACGGGGGCACCTTCGGCCGCTACTGCGA
GGGCTCCGAGGATGCCTGTGAGGAGCCGTGCTTCCCGAGTGTCCAC
TGCGTTCCTGGGAAGGGCTGCGAGGCCTGCCCTCCAAACCTGACTG
GGGATGGGCGGCACTGTGCGGCTCTGGGGAGCTCTTTCCTGTGTCA
GAACCAGTCCTGCCCTGTGAATTACTGCTACAATCAAGGCCACTGC
TACATCTCCCAGACTCTGGGCTGTCAGCCCATGTGCACCTGCCCCC
CAGCCTTCACTGACAGCCGCTGCTTCCTGGCTGGGAACAACTTCAG
TCCAACTGTCAACCTAGAACTTCCCTTAAGAGTCATCCAGCTCTTGC
TCAGTGAAGAGGAAAATGCCTCCATGGCAGAGGTCAACGCCTCGG
TGGCATACAGACTGGGGACCCTGGACATGCGGGCCTTTCTCCGCAA
CAGCCAAGTGGAACGAATCGATTCTGCAGCACCGGCCTCGGGAAG
CCCCATCCAACACTGGATGGTCATCTCGGAGTTCCAGTACCGCCCT
CGGGGCCCGGTCATTGACTTCCTGAACAACCAGCTGCTGGCCGCGG
TGGTGGAGGCGTTCTTATACCACGTTCCACGGAGGAGTGAGGAGCC
CAGGAACGACGTGGTCTTCCAGCCCATTTCCGGGGAAGACGTGCGC
GATGTGACAGCCCTGAACGTGAGCACGCTGAAGGCTTACTTCAGAT
GCGATGGCTACAAGGGCTACGACCTGGTCTACAGCCCCCAGAGCG
GCTTCACCTGCGTGTCCCCGTGCAGTAGGGGCTACTGTGACCATGG
AGGCCAGTGCCAGCACCTGCCCAGTGGGCCCCGCTGCAGCTGTGTG
TCCTTCTCCATCTACACGGCCTGGGGCGAGCACTGTGAGCACCTGA
GCATGAAACTCGACGCGTTCTTCGGCATCTTCTTTGGGGCCCTGGG
CGGCCTCTTGCTGCTGGGGGTCGGGACGTTCGTGGTCCTGCGCTTCT
GGGGTTGCTCCGGGGCCAGGTTCTCCTATTTCCTGAACTCAGCTGA
GGCCTTGCCTTGAAGGGGCAGCTGTGGCCTAGGCTACCTCAAGACT
CACCTCATCCTTACCGCACATTTAAGGCGCCATTGCTTTTGGGAGA
CTGGAAAAGGGAAGGTGACTGAAGGCTGTCAGGATTCTTCAAGGA
GAATGAATACTGGGAATCAAGACAAGACTATACCTTATCCATAGGC
GCAGGTGCACAGGGGGAGGCCATAAAGATCAAACATGCATGGATG
GGTCCTCACGCAGACACACCCACAGAAGGACACTAGCCTGTGCAC
GCGCGCGTGCACACACACACACACACACACGAGTTCATAATGTGGT
GATGGCCCTAAGTTAAGCAAAATGCTTCTGCACACAAAACTCTCTG
GTTTACTTCAAATTAACTCTATTTAAATAAAGTCTCTCTGACTTTTT
GTGTCTCC

SEQ ID NO: 3455

TACAGCCCCAAGGTCGCTCCCTCTGGGGCCCTTTCTTCCCCATTCTT
CCCAGCAGCCCAAAGCTCTGGTGGGACAGGGGCAGCCCCTGGGGA
GGGAGGAGAGGACCCAGGAACCCGGCTAGGAGGGTGGCCCACCCA
TTTCCAGTGTGACCTGTTCCCATTCCCCCATGTCTCCTCCCATCCCT
CCCGCCACTCAGCTCAGGCTGATGAGAAGCAGAGCAACGGGTGTA
TCGGTGTTTTCTTTCCTGGTGGGGTAGTGGGGTGGGGCTGAGGAGA
GAAAAGGGTGATTAGCGTGGGGCCCCGCCCTCTTTTGTCCTCTTCC
CAGGTTCCCTGGCCCCTTCGGAGAAACGCACTTGGTTCGGGCCAGC
CGCCTGAGGGGACGGGCTCACGTCTGCTCCTCACACTGCAGCTGCT
GGGCCGTGGAGCTTCCCCAGGGAGCCAGGGGGACTTTTGCCGCAG
CCATGAAGGGGGCACGCTGGAGGAGGGTCCCCTGGGTGTCCCTGA
GCTGCCTGTGTCTCTGCCTCCTTCCGCATGTGGTCCCAGGAACCACA
GAGGACACATTAATAACTGGAAGTAAAACTCCTGCCCCAGTCACCT
CAACAGGCTCAACAACAGCGACACTAGAGGGACAATCAACTGCAG
CTTCTTCAAGGACCTCTAATCAGGACATATCAGCTTCATCTCAGAA
CCACCAGACTAAGAGCACGGAGACCACCAGCAAAGCTCAAACCGA
CACCCTCACGCAGATGATGACATCAACTCTTTTTTCTTCCCCAAGTG
TACACAATGTGATGGAGACTGTTACGCAGGAGACAGCTCCTCCAGA
TGAAATGACCACATCATTTCCCTCCAGTGTCACCAACACACTCATG
ATGACATCAAAGACTATAACAATGACAACCTCCACAGACTCCACTC
TTGGAAACACAGAAGAGACATCAACAGCAGGAACTGAAAGTTCTA
CCCCAGTGACCTCAGCAGTCTCAATAACAGCTGGACAGGAAGGAC
AATCACGAACAACTTCCTGGAGGACCTCTATCCAAGACACATCAGC
TTCTTCTCAGAACCACTGGACTCGGAGCACGCAGACCACCAGGGAA
TCTCAAACCAGCACCCTAACACACAGAACCACTTCAACTCCTTCTT
TCTCTCCAAGTGTACACAATGTGACAGGGACTGTTTCTCAGAAGAC
ATCTCCTTCAGGTGAAACAGCTACCTCATCCCTCTGTAGTGTCACA
AACACATCCATGATGACATCAGAGAAGATAACAGTGACAACCTCC
ACAGGCTCCACTCTTGGAAACCCAGGGGAGACATCATCAGTACCTG
TTACTGGAAGTCTTATGCCAGTCACCTCAGCAGCCTTAGTAACAGT
TGATCCAGAAGGACAATCACCAGCAACTTTCTCAAGGACTTCTACT
CAGGACACAACAGCTTTTTCTAAGAACCACCAGACTCAGAGCGTGG
AGACCACCAGAGTATCTCAAATCAACACCCTCAACACCCTCACACC
GGTTACAACATCAACTGTTTTATCCTCACCAAGTGGATTCAACCCA
AGTGGAACAGTTTCTCAGGAGACATTCCCTTCTGGTGAAACAACCA
TCTCATCCCCTTCCAGTGTCAGCAATACATTCCTGGTAACATCAAA
GGTGTTCAGAATGCCAATCTCCAGAGACTCTACTCTTGGAAACACA
GAGGAGACATCACTATCTGTAAGTGGAACCATTTCTGCAATCACTT
CCAAAGTTTCAACCATATGGTGGTCAGACACTCTGTCAACAGCACT
CTCCCCCAGTTCTCTACCTCCAAAAATATCCACAGCTTTCCACACCC
AGCAGAGTGAAGGTGCAGAGACCACAGGACGGCCTCATGAGAGGA
GCTCATTCTCTCCAGGTGTGTCTCAAGAAATATTTACTCTACATGAA
ACAACAACATGGCCTTCCTCATTCTCCAGCAAAGGCCACACAACTT
GGTCACAAACAGAACTGCCCTCAACATCAACAGGTGCTGCCACTAG
GCTTGTCACAGGAAATCCATCTACAGGGGCAGCTGGCACTATTCCA
AGGGTCCCCTCTAAGGTCTCAGCAATAGGGGAACCAGGAGAGCCC
ACCACATACTCCTCCCACAGCACAACTCTCCCAAAAACAACAGGGG
CAGGCGCCCAGACACAATGGACACAAGAAACGGGGACCACTGGAG
AGGCTCTTCTCAGCAGCCCAAGCTACAGTGTGACTCAGATGATAAA
AACGGCCACATCCCCATCTTCTTCACCTATGCTGGATAGACACACA
TCACAACAAATTACAACGGCACCATCAACAAATCATTCAACAATAC
ATTCCACAAGCACCTCTCCTCAGGAATCACCAGCTGTTTCCCAAAG
GGGTCACACTCAAGCCCCGCAGACCACACAAGAATCACAAACCAC
GAGGTCCGTCTCCCCCATGACTGACACCAAGACAGTCACCACCCCA
GGTTCTTCCTTCACAGCCAGTGGGCACTCGCCCTCAGAAATTGTTCC
TCAGGACGCACCCACCATAAGTGCAGCAACAACCTTTGCCCCAGCT
CCCACCGGGGATGGTCACACAACCCAGGCCCCGACCACAGCACTG
CAGGCAGCACCCAGCAGCCATGATGCCACCCTGGGGCCCTCAGGA
GGCACGTCACTTTCCAAAACAGGTGCCCTTACTCTGGCCAACTCTG
TAGTGTCAACACCAGGGGGCCCAGAAGGACAATGGACATCAGCCT
CTGCCAGCACCTCACCTGACACAGCAGCAGCCATGACCCATACCCA
CCAGGCTGAGAGCACAGAGGCCTCTGGACAAACACAGACCAGCGA
ACCGGCCTCCTCAGGGTCACGAACCACCTCAGCGGGCACAGCTACC
CCTTCCTCATCCGGGGCGAGTGGCACAACACCTTCAGGAAGCGAAG
GAATATCCACCTCAGGAGAGACGACAAGGTTTTCATCAAACCCCTC
CAGGGACAGTCACACAACCCAGTCAACAACCGAATTGCTGTCCGCC
TCAGCCAGTCATGGTGCCATCCCAGTAAGCACAGGAATGGCGTCTT
CGATCGTCCCCGGCACCTTTCATCCCACCCTCTCTGAGGCCTCCACT
GCAGGGAGACCGACAGGACAGTCAAGCCCAACTTCTCCCAGTGCC
TCTCCTCAGGAGACAGCCGCCATTTCCCGGATGGCCCAGACTCAGA
GGACAAGAACCAGCAGAGGGTCTGACACTATCAGCCTGGCGTCCC
AGGCAACCGACACCTTCTCAACAGTCCCACCCACACCTCCATCGAT
CACATCCAGTGGGCTTACATCTCCACAAACCCAGACCCACACTCTG
TCACCTTCAGGGTCTGGTAAAACCTTCACCACGGCCCTCATCAGCA
ACGCCACCCCTCTTCCTGTCACCAGCACCTCCTCAGCCTCCACAGGT
CACGCCACCCCTCTTGCTGTCAGCAGTGCTACCTCAGCTTCCACAGT
ATCCTCGGACTCCCCTCTGAAGATGGAAACATCAGGAATGACAACA
CCGTCACTGAAGACAGACGGTGGGAGACGCACAGCCACATCACCA
CCCCCCACAACCTCCCAGACCATCATTTCCACCATTCCCAGCACTG
CCATGCACACCCGCTCCACAGCTGCCCCCATCCCCATCCTGCCTGA
GAGAGGAGTTTCCCTCTTCCCCTATGGGGCAGACGCCGGGGACCTG
GAGTTCGTCAGGAGGACCGTGGACTTCACCTCCCCACTCTTCAAGC
CGGCGACTGGCTTCCCCCTTGGCTCCTCTCTCCGTGATTCCCTCTAC
TTCACAGACAATGGCCAGATCATCTTCCCAGAGTCAGACTACCAGA
TTTTCTCCTACCCCAACCCACTCCCAACAGGCTTCACAGGCCGGGA
CCCTGTGGCCCTGGTGGCTCCGTTCTGGGACGATGCTGACTTCTCCA
CTGGTCGGGGGACCACATTTTATCAGGAATACGAGACGTTCTATGG
TGAACACAGCCTGCTAGTCCAGCAGGCCGAGTCTTGGATTAGAAAG
ATCACAAACAACGGGGGCTACAAGGCCAGGTGGGCCCTAAAGGTC
ACGTGGGTCAATGCCCACGCCTATCCTGCCCAGTGGACCCTCGGGA
GCAACACCTACCAAGCCATCCTCTCCACGGACGGGAGCAGGTCCTA
TGCCCTGTTTCTCTACCAGAGCGGTGGGATGCAGTGGGACGTGGCC
CAGCGCTCAGGCAAGCCGGTGCTCATGGGCTTCTCTAGTGGAGATG
GCTTTTTCGAAAACAGCCCACTGATGTCCCAGCCAGTGTGGGAGAG
GTATCGCCCTGATAGATTCCTGAATTCCAACTCAGGCCTCCAAGGG
CTGCAGTTCTACGGGCTACACCGGGAAGAAAGGCCCAACTACCGTC
TCGAGTGCCTGCAGTGGCTGAAGAGCCAGCCTCGGTGGCCCAGCTG
GGGCTGGAACCAGGTCTCCTGCCCTTGTTCCTGGCAGCAGGGACGA
CGGGACTTACGATTCCAACCCGTCAGCATAGGTCGCTGGGGCCTCG
GCAGTAGGCAGCTGTGCAGCTTCACCTCTTGGCGAGGAGGCGTGTG
CTGCAGCTACGGGCCCTGGGGAGAGTTTCGTGAAGGCTGGCACGTG
CAGCGTCCTTGGCAGTTGGCCCAGGAACTGGAGCCACAGAGCTGGT
GCTGCCGCTGGAATGACAAGCCCTACCTCTGTGCCCTGTACCAGCA
GAGGCGGCCCCACGTGGGCTGTGCTACATACAGGCCCCCACAGCCC
GCCTGGATGTTCGGGGACCCCCACATCACCACCTTGGATGGTGTCA
GTTACACCTTCAATGGGCTGGGGGACTTCCTGCTGGTCGGGGCCCA
AGACGGGAACTCCTCCTTCCTGCTTCAGGGCCGCACCGCCCAGACT
GGCTCAGCCCAGGCCACCAACTTCATCGCCTTTGCGGCTCAGTACC
GCTCCAGCAGCCTGGGCCCCGTCACGGTCCAATGGCTCCTTGAGCC
TCACGACGCAATCCGTGTCCTGCTGGATAACCAGACTGTGACATTT
CAGCCTGACCATGAAGACGGCGGAGGCCAGGAGACGTTCAACGCC
ACCGGAGTCCTCCTGAGCCGCAACGGCTCTGAGGCCTCCGCCAGCT
TCGACGGCTGGGCCACCGTCTCGGTGATCGCGCTCTCCAACATCCT
CCACTCCTCCGCCAGCCTCCCGCCCGAGTACCAGAACCGCACGGAG
GGGCTCCTGGGGGTCTGGAATAACAATCCAGAGGACGACTTCAGG
ATGCCCAATGGCTCCACCATTCCCCCAGGGAGCCCTGAGGAGATGC
TTTTCCACTTTGGAATGACCTGGCAGATCAACGGGACAGGCCTCCT
TGGCAAGAGGAATGACCAGCTGCCTTCCAACTTCACCCCTGTTTTC
TACTCACAACTGCAAAAAAACAGCTCCTGGGCTGAACATTTGATCT
CCAACTGTGACGGAGATAGCTCATGCATCTATGACACCCTGGCCCT
GCGCAACGCAAGCATCGGACTTCACACGAGGGAAGTCAGTAAAAA
CTACGAGCAGGCGAACGCCACCCTCAATCAGTACCCGCCCTCCATC
AATGGTGGTCGTGTGATTGAAGCCTACAAGGGGCAGACCACGCTG
ATTCAGTACACCAGCAATGCTGAGGATGCCAACTTCACGCTCAGAG
ACAGCTGCACCGACTTGGAGCTCTTTGAGAATGGGACGTTGCTGTG
GACACCCAAGTCGCTGGAGCCATTCACTCTGGAGATTCTAGCAAGA
AGTGCCAAGATTGGCTTGGCATCTGCACTCCAGCCCAGGACTGTGG
TCTGCCATTGCAATGCAGAGAGCCAGTGTTTGTACAATCAGACCAG
CAGGGTGGGCAACTCCTCCCTGGAGCTCTGGGGAGCTCTTTCCTGT
GTCAGAACCAGTCCTGCCCTGTGAATTACTGCTACAATCAAGGCCA
CTGCTACATCTCCCAGACTCTGGGCTGTCAGCCCATGTGCACCTGC
CCCCCAGCCTTCACTGACAGCCGCTGCTTCCTGGCTGGGAACAACT
TCAGTCCAACTGTCAACCTAGAACTTCCCTTAAGAGTCATCCAGCT
CTTGCTCAGTGAAGAGGAAAATGCCTCCATGGCAGAGGTCAACGC
CTCGGTGGCATACAGACTGGGGACCCTGGACATGCGGGCCTTTCTC
CGCAACAGCCAAGTGGAACGAATCGATTCTGCAGCACCGGCCTCG
GGAAGCCCCATCCAACACTGGATGGTCATCTCGGAGTTCCAGTACC
GCCCTCGGGGCCCGGTCATTGACTTCCTGAACAACCAGCTGCTGGC
CGCGGTGGTGGAGGCGTTCTTATACCACGTTCCACGGAGGAGTGAG
GAGCCCAGGAACGACGTGGTCTTCCAGCCCATTTCCGGGGAAGAC
GTGCGCGATGTGACAGCCCTGAACGTGAGCACGCTGAAGGCTTACT
TCAGATGCGATGGCTACAAGGGCTACGACCTGGTCTACAGCCCCCA
GAGCGGCTTCACCTGCGTGTCCCCGTGCAGTAGGGGCTACTGTGAC
CATGGAGGCCAGTGCCAGCACCTGCCCAGTGGGCCCCGCTGCAGCT
GTGTGTCCTTCTCCATCTACACGGCCTGGGGCGAGCACTGTGAGCA
CCTGAGCATGAAACTCGACGCGTTCTTCGGCATCTTCTTTGGGGCC
CTGGGCGGCCTCTTGCTGCTGGGGGTCGGGACGTTCGTGGTCCTGC
GCTTCTGGGGTTGCTCCGGGGCCAGGTTCTCCTATTTCCTGAACTCA
GCTGAGGCCTTGCCTTGAAGGGGCAGCTGTGGCCTAGGCTACCTCA
AGACTCACCTCATCCTTACCGCACATTTAAGGCGCCATTGCTTTTGG
GAGACTGGAAAAGGGAAGGTGACTGAAGGCTGTCAGGATTCTTCA
AGGAGAATGAATACTGGGAATCAAGACAAGACTATACCTTATCCA
TAGGCGCAGGTGCACAGGGGGAGGCCATAAAGATCAAACATGCAT
GGATGGGTCCTCACGCAGACACACCCACAGAAGGACACTAGCCTG
TGCACGCGCGCGTGCACACACACACACACACACACGAGTTCATAAT
GTGGTGATGGCCCTAAGTTAAGCAAAATGCTTCTGCACACAAAACT
CTCTGGTTTACTTCAAATTAACTCTATTTAAATAAAGTCTCTCTGAT
TTTTGTGTCTCC

SEQ ID NO: 3456

TACAGCCCCAAGGTCGCTCCCTCTGGGGCCCTTTCTTCCCCATTCTT
CCCAGCAGCCCAAAGCTCTGGTGGGACAGGGGCAGCCCCTGGGGA
GGGAGGAGAGGACCCAGGAACCCGGCTAGGAGGGTGGCCCACCCA
TTTCCAGTGTGACCTGTTCCCATTCCCCCATGTCTCCTCCCATCCCT
CCCGCCACTCAGCTCAGGCTGATGAGAAGCAGAGCAACGGGTGTA
TCGGTGTTTTCTTTCCTGGTGGGGTAGTGGGGTGGGGCTGAGGAGA
GAAAAGGGTGATTAGCGTGGGGCCCCGCCCTCTTTTGTCCTCTTCC
CAGGTTCCCTGGCCCCTTCGGAGAAACGCACTTGGTTCGGGCCAGC
CGCCTGAGGGGACGGGCTCACGTCTGCTCCTCACACTGCAGCTGCT
GGGCCGTGGAGCTTCCCCAAGGGAGCCAGGGGGACTTTTGCCGCA
GCCATGAAGGGGGCACGCTGGAGGAGGGTCCCCTGGGTGTCCCTG
AGCTGCCTGTGTCTCTGCCTCCTTCCGCATGTGGTCCCAGGAATGAC
AACACCGTCACTGAAGACAGACGGTGGGAGACGCACAGCCACATC
ACCACCCCCCACAACCTCCCAGACCATCATTTCCACCATTCCCAGC
ACTGCCATGCACACCCGCTCCACAGCTGCCCCCATCCCCATCCTGC
CTGAGAGAGGAGTTTCCCTCTTCCCCTATGGGGCAGACGCCGGGGA
CCTGGAGTTCGTCAGGAGGACCGTGGACTTCACCTCCCCACTCTTC
AAGCCGGCGACTGGCTTCCCCCTTGGCTCCTCTCTCCGTGATTCCCT
CTACTTCACAGACAATGGCCAGATCATCTTCCCAGAGTCAGACTAC
CAGATTTTCTCCTACCCCAACCCACTCCCAACAGGCTTCACAGGCC
GGGACCCTGTGGCCCTGGTGGCTCCGTTCTGGGACGATGCTGACTT
CTCCACTGGTCGGGGGACCACATTTTATCAGGAATACGAGACGTTC
TATGGTGAACACAGCCTGCTAGTCCAGCAGGCCGAGTCTTGGATTA
GAAAGATCACAAACAACGGGGGCTACAAGGCCAGGTGGGCCCTAA
AGGTCACGTGGGTCAATGCCCACGCCTATCCTGCCCAGTGGACCCT
CGGGAGCAACACCTACCAAGCCATCCTCTCCACGGACGGGAGCAG
GTCCTATGCCCTGTTTCTCTACCAGAGCGGTGGGATGCAGTGGGAC
GTGGCCCAGCGCTCAGGCAAGCCGGTGCTCATGGGCTTCTCTAGTG
GAGATGGCTATTTCGAAAACAGCCCACTGATGTCCCAGCCAGTGTG
GGAGAGGTATCGCCCTGATAGATTCCTGAATTCCAACTCAGGCCTC
CAAGGGCTGCAGTTCTACAGGCTACACCGGGAAGAAAGGCCCAAC
TACCGTCTCGAGTGCCTGCAGTGGCTGAAGAGCCAGCCTCGGTGGC
CCAGCTGGGGCTGGAACCAGGTCTCCTGCCCTTGTTCCTGGCAGCA
GGGACGACGGGACTTACGATTCCAACCCGTCAGCATAGGTCGCTGG
GGCCTCGGCAGTAGGCAGCTGTGCAGCTTCACCTCTTGGCGAGGAG
GCGTGTGCTGCAGCTACGGGCCCTGGGGAGAGTTTCGTGAAGGCTG
GCACGTGCAGCGTCCTTGGCAGTTGGCCCAGGAACTGGAGCCACA
GAGCTGGTGCTGCCGCTGGAATGACAAGCCCTACCTCTGTGCCCTG
TACCAGCAGAGGCGGCCCCACGTGGGCTGTGCTACATACAGGCCCC
CACAGCCCGCCTGGATGTTCGGGGACCCCCACATCACCACCTTGGA
TGGTGTCAGTTACACCTTCAATGGGCTGGGGGACTTCCTGCTGGTC
GGGGCCCAAGACGGGAACTCCTCCTTCCTGCTTCAGGGCCGCACCG
CCCAGACTGGCTCAGCCCAGGCCACCAACTTCATCGCCTTTGCGGC
TCAGTACCGCTCCAGCAGCCTGGGCCCCGTCACGGTCCAATGGCTC
CTTGAGCCTCACGACGCAATCCGTGTCCTGCTGGATAACCAGACTG
TGACATTTCAGCCTGACCATGAAGACGGCGGAGGCCAGGAGACGT
TCAACGCCACCGGAGTCCTCCTGAGCCGCAACGGCTCTGAGGTCTC
GGCCAGCTTCGACGGCTGGGCCACCGTCTCGGTGATCGCGCTCTCC
AACATCCTCCACGCCTCCGCCAGCCTCCCGCCCGAGTACCAGAACC
GCACGGAGGGGCTCCTGGGGGTCTGGAATAACAATCCAGAGGACG
ACTTCAGGATGCCCAATGGCTCCACCATTCCCCCAGGGAGCCCTGA
GGAGATGCTTTTCCACTTTGGAATGACCTGGCAGATCAACGGGACA
GGCCTCCTTGGCAAGAGGAATGACCAGCTGCCTTCCAACTTCACCC
CTGTTTTCTACTCACAACTGCAAAAAAACAGCTCCTGGGCTGAACA
TTTGATCTCCAACTGTGACGGAGATAGCTCATGCATCTATGACACC
CTGGCCCTGCGCAACGCAAGCATCGGACTTCACACGAGGGAAGTC
AGTAAAAACTACGAGCAGGCGAACGCCACCCTCAATCAGTACCCG
CCCTCCATCAATGGTGGTCGTGTGATTGAAGCCTACAAGGGGCAGA
CCACGCTGATTCAGTACACCAGCAATGCTGAGGATGCCAACTTCAC
GCTCAGAGACAGCTGCACCGACTTGGAGCTCTTTGAGAATGGGACG
TTGCTGTGGACACCCAAGTCGCTGGAGCCATTCACTCTGGAGATTC
TAGCAAGAAGTGCCAAGATTGGCTTGGCATCTGCACTCCAGCCCAG
GACTGTGGTCTGCCATTGCAATGCAGAGAGCCAGTGTTTGTACAAT
CAGACCAGCAGGGTGGGCAACTCCTCCCTGGAGGTGGCTGGCTGC
AAGTGTGACGGGGGCACCTTCGGCCGCTACTGCGAGGGCTCCGAG
GATGCCTGTGAGGAGCCGTGCTTCCCGAGTGTCCACTGCGTTCCTG
GGAAGGGCTGCGAGGCCTGCCCTCCAAACCTGACTGGGGATGGGC
GGCACTGTGCGGCTCTGGGGAGCTCTTTCCTGTGTCAGAACCAGTC
CTGCCCTGTGAATTACTGCTACAATCAAGGCCACTGCTACATCTCC
CAGACTCTGGGCTGTCAGCCCATGTGCACCTGCCCCCCAGCCTTCA
CTGACAGCCGCTGCTTCCTGGCTGGGAACAACTTCAGTCCAACTGT
CAACCTAGAACTTCCCTTAAGAGTCATCCAGCTCTTGCTCAGTGAA
GAGGAAAATGCCTCCATGGCAGAGGTCAACGCCTCGGTGGCATAC
AGACTGGGGACCCTGGACATGCGGGCCTTTCTCCGCAACAGCCAAG
TGGAACGAATCGATTCTGCAGCACCGGCCTCGGGAAGCCCCATCCA
ACACTGGATGGTCATCTCGGAGTTCCAGTACCGCCCTCGGGGCCCG
GTCATTGACTTCCTGAACAACCAGCTGCTGGCCGCGGTGGTGGAGG
CGTTCTTATACCACGTTCCACGGAGGAGTGAGGAGCCCAGGAACG
ACGTGGTCTTCCAGCCCATCTCCGGGGAAGACGTGCGCGATGTGAC
AGCCCTGAACGTGAGCACGCTGAAGGCTTACTTCAGATGCGATGGC
TACAAGGGCTACGACCTGGTCTACAGCCCCCAGAGCGGCTTCACCT
GCGTGTCCCCGTGCAGTAGGGGCTACTGTGACCATGGAGGCCAGTG
CCAGCACCTGCCCAGTGGGCCCCGCTGCAGCTGTGTGTCCTTCTCC
ATCTACACGGCCTGGGGCGAGCACTGTGAGCACCTGAGCATGAAA
CTCGACGCGTTCTTCGGCATCTTCTTTGGGGCCCTGGGCGGCCTCTT
GCTGCTGGGGGTCGGGACGTTCGTGGTCCTGCGCTTCTGGGGTTGC
TCCGGGGCCAGGTTCTCCTATTTCCTGAACTCAGCTGAGGCCTTGCC
TTGAAGGGGCAGCTGTGGCCTAGGCTACCTCAAGACTCACCTCATC
CTTACCGCACATTTAAGGCGCCATTGCTTTTGGGAGACTGGAAAAG
GGAAGGTGACTGAAGGCTGTCAGGATTCTTCAAGGAGAATGAATA
CTGGGAATCAAGACAGGACTATACCTTATCCATAGGCGCAGGTGCA
CAGGGGGAGGCCATAAAGATCAAACATGCATGGATGGGTCCTCAC
GCAGACACACCCACAGAAGGACACTAGCCTGGCGCGCGTGCACAC
ACACACACACACACACGAGTTCATAATGTGGTGATGGCCCTAAGTT
AAGCAAAATGCTTCTGCACACAAAACTCTCTGGTTTACTTCAAATT
AACTCTATTTAAATAAAGTCTCTCTGACTTTTTGTGTCTCCAAAAAA
AAAAAAAAAAA

SEQ ID NO: 3457

TACAGCCCCAAGGTCGCTCCCTCTGGGGCCCTTTCTTCCCCATTCTT
CCCAGCAGCCCAAAGCTCTGGTGGGACAGGGGCAGCCCCTGGGGA
GGGAGGAGAGGACCCAGGAACCCGGCTAGGAGGGTGGCCCACCCA
TTTCCAGTGTGACCTGTTCCCATTCCCCCATGTCTCCTCCCATCCCT
CCCGCCACTCAGCTCAGGCTGATGAGAAGCAGAGCAACGGGTGTA
TCGGTGTTTTCTTTCCTGGTGGGGTAGTGGGGTGGGGCTGAGGAGA
GAAAAGGGTGATTAGCGTGGGGCCCCGCCCTCTTTTGTCCTCTTCC
CAGGTTCCCTGGCCCCTTCGGAGAAACGCACTTGGTTCGGGCCAGC
CGCCTGAGGGGACGGGCTCACGTCTGCTCCTCACACTGCAGCTGCT
GGGCCGTGGAGCTTCCCCAAGGGAGCCAGGGGGACTTTTGCCGCA
GCCATGAAGGGGGCACGCTGGAGGAGGGTCCCCTGGGTGTCCCTG
AGCTGCCTGTGTCTCTGCCTCCTTCCGCATGTGGTCCCAGGAGTTTC
CCTCTTCCCCTATGGGGCAGACGCCGGGGACCTGGAGTTCGTCAGG
AGGACCGTGGACTTCACCTCCCCACTCTTCAAGCCGGCGACTGGCT
TCCCCCTTGGCTCCTCTCTCCGTGATTCCCTCTACTTCACAGACAAT
GGCCAGATCATCTTCCCAGAGTCAGACTACCAGATTTTCTCCTACC
CCAACCCACTCCCAACAGGCTTCACAGGCCGGGACCCTGTGGCCCT
GGTGGCTCCGTTCTGGGACGATGCTGACTTCTCCACTGGTCGGGGG
ACCACATTTTATCAGGAATACGAGACGTTCTATGGTGAACACAGCC
TGCTAGTCCAGCAGGCCGAGTCTTGGATTAGAAAGATCACAAACA
ACGGGGGCTACAAGGCCAGGTGGGCCCTAAAGGTCACGTGGGTCA
ATGCCCACGCCTATCCTGCCCAGTGGACCCTCGGGAGCAACACCTA
CCAAGCCATCCTCTCCACGGACGGGAGCAGGTCCTATGCCCTGTTT
CTCTACCAGAGCGGTGGGATGCAGTGGGACGTGGCCCAGCGCTCA
GGCAAGCCGGTGCTCATGGGCTTCTCTAGTGGAGATGGCTATTTCG
AAAACAGCCCACTGATGTCCCAGCCAGTGTGGGAGAGGTATCGCC
CTGATAGATTCCTGAATTCCAACTCAGGCCTCCAAGGGCTGCAGTT
CTACAGGCTACACCGGGAAGAAAGGCCCAACTACCGTCTCGAGTG
CCTGCAGTGGCTGAAGAGCCAGCCTCGGTGGCCCAGCTGGGGCTG
GAACCAGGTCTCCTGCCCTTGTTCCTGGCAGCAGGGACGACGGGAC
TTACGATTCCAACCCGTCAGCATAGGTCGCTGGGGCCTCGGCAGTA
GGCAGCTGTGCAGCTTCACCTCTTGGCGAGGAGGCGTGTGCTGCAG
CTACGGGCCCTGGGGAGAGTTTCGTGAAGGCTGGCACGTGCAGCGT
CCTTGGCAGTTGGCCCAGGAACTGGAGCCACAGAGCTGGTGCTGCC
GCTGGAATGACAAGCCCTACCTCTGTGCCCTGTACCAGCAGAGGCG
GCCCCACGTGGGCTGTGCTACATACAGGCCCCCACAGCCCGCCTGG
ATGTTCGGGGACCCCCACATCACCACCTTGGATGGTGTCAGTTACA
CCTTCAATGGGCTGGGGGACTTCCTGCTGGTCGGGGCCCAAGACGG
GAACTCCTCCTTCCTGCTTCAGGGCCGCACCGCCCAGACTGGCTCA
GCCCAGGCCACCAACTTCATCGCCTTTGCGGCTCAGTACCGCTCCA
GCAGCCTGGGCCCCGTCACGGTCCAATGGCTCCTTGAGCCTCACGA
CGCAATCCGTGTCCTGCTGGATAACCAGACTGTGACATTTCAGCCT
GACCATGAAGACGGCGGAGGCCAGGAGACGTTCAACGCCACCGGA
GTCCTCCTGAGCCGCAACGGCTCTGAGGTCTCGGCCAGCTTCGACG
GCTGGGCCACCGTCTCGGTGATCGCGCTCTCCAACATCCTCCACGC
CTCCGCCAGCCTCCCGCCCGAGTACCAGAACCGCACGGAGGGGCTC
CTGGGGGTCTGGAATAACAATCCAGAGGACGACTTCAGGATGCCC
AATGGCTCCACCATTCCCCCAGGGAGCCCTGAGGAGATGCTTTTCC
ACTTTGGAATGACCTGGCAGATCAACGGGACAGGCCTCCTTGGCAA
GAGGAATGACCAGCTGCCTTCCAACTTCACCCCTGTTTTCTACTCAC
AACTGCAAAAAAACAGCTCCTGGGCTGAACATTTGATCTCCAACTG
TGACGGAGATAGCTCATGCATCTATGACACCCTGGCCCTGCGCAAC
GCAAGCATCGGACTTCACACGAGGGAAGTCAGTAAAAACTACGAG
CAGGCGAACGCCACCCTCAATCAGTACCCGCCCTCCATCAATGGTG
GTCGTGTGATTGAAGCCTACAAGGGGCAGACCACGCTGATTCAGTA
CACCAGCAATGCTGAGGATGCCAACTTCACGCTCAGAGACAGCTGC
ACCGACTTGGAGCTCTTTGAGAATGGGACGTTGCTGTGGACACCCA
AGTCGCTGGAGCCATTCACTCTGGAGATTCTAGCAAGAAGTGCCAA
GATTGGCTTGGCATCTGCACTCCAGCCCAGGACTGTGGTCTGCCAT
TGCAATGCAGAGAGCCAGTGTTTGTACAATCAGACCAGCAGGGTG
GGCAACTCCTCCCTGGAGGTGGCTGGCTGCAAGTGTGACGGGGGC
ACCTTCGGCCGCTACTGCGAGGGCTCCGAGGATGCCTGTGAGGAGC
CGTGCTTCCCGAGTGTCCACTGCGTTCCTGGGAAGGGCTGCGAGGC
CTGCCCTCCAAACCTGACTGGGGATGGGCGGCACTGTGCGGCTCTG
GGGAGCTCTTTCCTGTGTCAGAACCAGTCCTGCCCTGTGAATTACT
GCTACAATCAAGGCCACTGCTACATCTCCCAGACTCTGGGCTGTCA
GCCCATGTGCACCTGCCCCCCAGCCTTCACTGACAGCCGCTGCTTC
CTGGCTGGGAACAACTTCAGTCCAACTGTCAACCTAGAACTTCCCT
TAAGAGTCATCCAGCTCTTGCTCAGTGAAGAGGAAAATGCCTCCAT
GGCAGAGGTCAACGCCTCGGTGGCATACAGACTGGGGACCCTGGA
CATGCGGGCCTTTCTCCGCAACAGCCAAGTGGAACGAATCGATTCT
GCAGCACCGGCCTCGGGAAGCCCCATCCAACACTGGATGGTCATCT
CGGAGTTCCAGTACCGCCCTCGGGGCCCGGTCATTGACTTCCTGAA
CAACCAGCTGCTGGCCGCGGTGGTGGAGGCGTTCTTATACCACGTT
CCACGGAGGAGTGAGGAGCCCAGGAACGACGTGGTCTTCCAGCCC
ATCTCCGGGGAAGACGTGCGCGATGTGACAGCCCTGAACGTGAGC
ACGCTGAAGGCTTACTTCAGATGCGATGGCTACAAGGGCTACGACC
TGGTCTACAGCCCCCAGAGCGGCTTCACCTGCGTGTCCCCGTGCAG
TAGGGGCTACTGTGACCATGGAGGCCAGTGCCAGCACCTGCCCAGT
GGGCCCCGCTGCAGCTGTGTGTCCTTCTCCATCTACACGGCCTGGG
GCGAGCACTGTGAGCACCTGAGCATGAAACTCGACGCGTTCTTCGG
CATCTTCTTTGGGGCCCTGGGCGGCCTCTTGCTGCTGGGGGTCGGG
ACGTTCGTGGTCCTGCGCTTCTGGGGTTGCTCCGGGGCCAGGTTCTC
CTATTTCCTGAACTCAGCTGAGGCCTTGCCTTGAAGGGGCAGCTGT
GGCCTAGGCTACCTCAAGACTCACCTCATCCTTACCGCACATTTAA
GGCGCCATTGCTTTTGGGAGACTGGAAAAGGGAAGGTGACTGAAG
GCTGTCAGGATTCTTCAAGGAGAATGAATACTGGGAATCAAGACA
GGACTATACCTTATCCATAGGCGCAGGTGCACAGGGGGAGGCCAT
AAAGATCAAACATGCATGGATGGGTCCTCACGCAGACACACCCAC
AGAAGGACACTAGCCTGGCGCGCGTGCACACACACACACACACAC
ACGAGTTCATAATGTGGTGATGGCCCTAAGTTAAGCAAAATGCTTC
TGCACACAAAACTCTCTGGTTTACTTCAAATTAACTCTATTTAAATA
AAGTCTCTCTGACTTTTTGTGTCTCCAAAAAAAAAAAAAAAAA

[0242] Variant polynucleotides of the present invention include polypeptides which are at least 70%, 75%, 80%, 85%, 90%, 95% or 100% identical to membrane associated molecules selected from the group consisting of SEQ ID NO:142, SEQ ID NOs: 3439-3445 and SEQ ID NOs: 3453-3457.

### Membrane Associated Molecules

[0243] In certain embodiments, the present invention is directed to methods of treating or diagnosing hyperproliferative diseases such as cancer, comprising the use of binding molecules which specifically bind to colon, lung, pancreatic or ovarian tumor-associated proteins. These polypeptides were identified from the malignant tumor samples of patients with colon cancer, as described in the Examples herein, and are overexpressed relative to normal nonmalignant colon tissue. All polypeptides described herein were isolated from the membranes of cells of tumor-associated cells. Thus, all membrane associated molecules described herein are membrane proteins and contain at least one or all of the following domains: extracellular domain, transmembrane domain or intracellular domain.

[0244] Table 1 lists membrane associated molecules of the present invention which were isolated from the cellular membranes of tumors from human patients with colon cancer and were identified via quantitative PCR (QPCR) analysis as described in Example 4.

TABLE 1

| BI NO: | SEQ ID NO: | PROTEIN NAME |
|---|---|---|
| BI6000000 | 3446 | SDAD1 (NM_018115.1) |
| BI6000001 | 3447 | GPR101 (NM_054021) |
| BI6000002 | 3448 | |
| BI6000003 | 3449 | OFR4N4 (NM_001005241) |
| BI6000004 | 3450 | OFR2G3 (NM_001001914) |
| BI6000005 | 3451 | |
| BI6000006 | 3452 | OFR4S2 (NM_001004059) |
| BI6000007 | 3458 | MUC 4 a (NP_060876) |
| BI6000008 | 3459 | MUC 4 b (NP_612155) |
| BI6000009 | 3460 | MUC 4 c (NP_612156) |
| BI6000010 | 3461 | MUC 4 d (NP_004523) |
| BI6000011 | 3462 | MUC 4 e (NP_612154) |

[0245] In certain embodiments of the present invention antibodies are employed which recognize polypeptides, variants or fragments thereof of the membrane associated molecules described herein. In certain embodiments polypeptides, variants or fragments thereof, of the membrane associated molecules include a predicted domain or region of the membrane associated molecules described herein. In certain embodiments, binding molecules such as antibodies which bind polypeptides, variants or fragments thereof, of the extracellular domains of the membrane associated molecules are employed.

[0246] Domains of the membrane associated molecules have been predicted based on homology to known polypeptide domains using the pfam program (see Bateman, A., et al., Nucl. Acids Res., 2004, Vol. 32, Database Issue, D138-D141). Table 2 below describes exemplary fragments based on homologies to known domains and the amino acid sequence positions which define the approximate beginning and end of the domains.

TABLE 2

| BI | SEQ ID | From AA | To AA | |
|---|---|---|---|---|
| NO. | NO: | Position | Position | Domain Description |
| BI6000000 | 3446 | 193 | 218 | coiled coil |
| | | 349 | 626 | SDA1 |
| BI6000001 | 3447 | 1 | 129 | IL6 |
| | | 1 | 23 | EGF_CA |
| | | 5 | 223 | Pfam:DUF975 |
| | | 5 | 131 | Pfam:FtsX |
| | | 5 | 510 | Pfam:Sre |
| | | 12 | 220 | PSN |
| | | 20 | 277 | Pfam:DUF914 |
| | | 25 | 145 | Pfam:PIG-U |
| | | 28 | 232 | Pfam:UPF0259 |
| | | 29 | 391 | Pfam:Dicty_CAR |
| | | 30 | 457 | Pfam:7tm_5 |
| | | 30 | 427 | Pfam:NADHdh |
| | | 34 | 216 | TLC |
| | | 35 | 457 | Pfam:7tm_2 |
| | | 37 | 59 | transmembrane |
| | | 38 | 140 | VKc |
| | | 38 | 212 | Pfam:Rnf-Nqr |
| | | 62 | 458 | Pfam:Presenilin |
| | | 66 | 303 | Pfam:PBP_sp32 |
| | | 72 | 94 | transmembrane |
| | | 97 | 250 | Pfam:DUF280 |
| | | 105 | 207 | Pfam:DUF895 |
| | | 106 | 259 | Pfam:DUF21 |
| | | 106 | 458 | Pfam:YjgP_YjgQ |
| | | 109 | 131 | transmembrane |
| | | 147 | 429 | Pfam:BTV_NS2 |
| | | 152 | 174 | transmembrane |
| | | 176 | 289 | Pfam:DUF809 |
| | | 197 | 417 | Pfam:MSP4 |
| | | 197 | 422 | Pfam:Neur_chan_memb |
| | | 198 | 220 | transmembrane |
| | | 202 | 239 | Pfam:DUF1443 |
| | | 207 | 279 | HMG |
| | | 212 | 407 | Pfam:S-antigen |
| | | 217 | 271 | GLA |
| | | 220 | 256 | LDLa |
| | | 221 | 297 | PTN |
| | | 243 | 401 | Pfam:Neuromodulin |
| | | 247 | 321 | HMG17 |
| | | 247 | 263 | low complexity |
| | | 271 | 364 | internal repeat 1 |
| | | 271 | 338 | internal repeat 2 |
| | | 278 | 371 | internal repeat 1 |
| | | 292 | 301 | low complexity |
| | | 312 | 373 | internal repeat 2 |
| | | 321 | 481 | Pfam:Sec62 |
| | | 369 | 470 | Pfam:Colicin_im |
| | | 379 | 395 | low complexity |
| | | 387 | 402 | ZnF_RBZ |
| | | 406 | 428 | transmembrane |
| | | 418 | 464 | LITAF |
| BI6000002 | 3448 | 1 | 43 | signal peptide |
| | | 29 | 51 | transmembrane |
| BI6000003 | 3449 | 1 | 21 | signal peptide |
| | | 41 | 287 | Pfam:7tm_1 |
| | | 25 | 47 | transmembrane |
| | | 59 | 78 | transmembrane |
| | | 98 | 120 | transmembrane |
| | | 141 | 163 | transmembrane |
| | | 200 | 222 | transmembrane |
| | | 243 | 265 | transmembrane |
| | | 270 | 289 | transmembrane |
| BI6000004 | 3450 | 1 | 39 | signal peptide |
| | | 41 | 290 | Pfam:7tm_1 |
| | | 26 | 48 | transmembrane |
| | | 61 | 83 | transmembrane |
| | | 98 | 120 | transmembrane |
| | | 144 | 166 | transmembrane |
| | | 199 | 221 | transmembrane |
| | | 241 | 263 | transmembrane |
| | | 273 | 292 | transmembrane |
| BI6000005 | 3451 | 125 | 139 | transmembrane |
| | | 1 | 123 | Pfam:DivIVA |
| | | 1 | 83 | Pfam:MbeD_MobD |
| | | 3 | 72 | Pfam:SecA_PP_bind |
| | | 4 | 77 | LER |
| | | 7 | 109 | SynN |
| | | 8 | 119 | RasGEFN |
| | | 14 | 108 | HPT |
| | | 17 | 107 | GED |
| | | 24 | 99 | Pfam:DUF709 |
| | | 25 | 137 | BBC |
| | | 25 | 124 | Pfam:Vicilin_N |
| | | 27 | 87 | Pfam:Exonuc_VII_S |
| | | 30 | 119 | SPEC |
| | | 30 | 50 | ITAM |
| | | 32 | 58 | GIT |
| | | 41 | 112 | DnaJ |
| | | 44 | 119 | Pfam:DUF526 |
| | | 44 | 123 | Pfam:Occludin_ELL |
| | | 53 | 108 | Pfam:HLH |
| | | 60 | 128 | coiled coil |
| | | 63 | 115 | L27 |
| | | 63 | 84 | NMU |
| | | 63 | 102 | Pfam:HTH_psq |
| | | 65 | 94 | RIIa |
| | | 67 | 140 | CARD |
| | | 69 | 113 | HLH |
| | | 69 | 128 | Hr1 |
| | | 95 | 117 | Pfam:Pox_A_type_inc |
| | | 110 | 124 | Pfam:Integrin_alpha |
| BI6000006 | 3452 | 39 | 285 | Pfam:7tm_1 |
| | | 1 | 49 | signal peptide |
| | | 31 | 53 | transmembrane |
| | | 58 | 80 | transmembrane |
| | | 100 | 122 | transmembrane |
| | | 143 | 165 | transmembrane |
| | | 201 | 223 | transmembrane |
| | | 236 | 258 | transmembrane |
| | | 268 | 287 | transmembrane |
| BI6000007 | 3458 | 1154 | 1311 | NIDO |
| | | 1310 | 1425 | AMOP |
| | | 1428 | 1610 | VWD |
| | | 1834 | 1866 | EGF |
| | | 1873 | 1914 | EGF |
| | | 2080 | 2117 | EGF |
| | | 2129 | 2151 | transmembrane |
| | | 40 | 344 | OSTEO |
| | | 66 | 122 | IGc1 |
| | | 69 | 273 | MA |
| | | 145 | 311 | MACPF |
| | | 205 | 328 | CBD_IV |
| | | 223 | 304 | BID_2 |
| | | 358 | 385 | PBD |
| | | 372 | 470 | B_lectin |
| | | 715 | 763 | ChtBD3 |
| | | 895 | 967 | H15 |
| | | 909 | 940 | CTNS |
| | | 957 | 1155 | AAA |
| | | 1118 | 1264 | CLECT |
| | | 1350 | 1577 | PRP |
| | | 1365 | 1422 | ZnF_UBR1 |
| | | 1469 | 1661 | LamG |
| | | 1471 | 1509 | RIIa |
| | | 1641 | 1665 | BTK |
| | | 1652 | 1750 | calpain_III |
| | | 1661 | 1689 | PTI |
| | | 1710 | 1845 | EPEND |
| | | 1716 | 1794 | C4 |
| | | 1793 | 1833 | FN1 |
| | | 1799 | 1854 | VWC |
| | | 1814 | 1885 | DISIN |
| | | 1817 | 1865 | EGF_Lam |
| | | 1825 | 1874 | C1 |
| | | 1825 | 1885 | FU |
| | | 1829 | 1953 | DM6 |
| | | 1829 | 1891 | PSA |
| | | 1833 | 1877 | LIM |
| | | 1840 | 1896 | FYVE |
| | | 1844 | 1865 | FES |
| | | 1846 | 1890 | AWS |
| | | 1848 | 1886 | ZnF_C4 |
| | | 1850 | 1885 | ShKT |
| | | 1851 | 1884 | BowB |
| | | 1852 | 1900 | ChtBD2 |
| | | 1854 | 1902 | VWC_out |
| | | 1860 | 1894 | BBOX |
| | | 1865 | 1898 | ANATO |
| | | 1873 | 1898 | DEFSN |
| | | 1873 | 1902 | ChtBD1 |
| | | 1874 | 1913 | GRAN |
| | | 1879 | 1902 | RING |
| | | 1890 | 1940 | Ubox |
| | | 1897 | 1934 | LRRNT |
| | | 1968 | 2082 | RPR |
| | | 2058 | 2117 | PSI |
| | | 2072 | 2096 | ZnF_C3H1 |
| | | 2080 | 2102 | FOLN |
| | | 2081 | 2117 | EGF_CA |
| | | 2082 | 2113 | SAPA |
| BI6000008 | 3459 | 1153 | 1255 | NIDO |
| | | 23 | 163 | VWD |
| | | 40 | 344 | OSTEO |
| | | 66 | 122 | IGc1 |
| | | 69 | 273 | MA |
| | | 145 | 311 | MACPF |
| | | 205 | 328 | CBD_IV |
| | | 223 | 304 | BID_2 |
| | | 358 | 385 | PBD |
| | | 372 | 470 | B_lectin |
| | | 594 | 702 | THN |
| | | 715 | 763 | ChtBD3 |
| | | 743 | 857 | SR |
| | | 831 | 968 | DoH |
| | | 894 | 966 | H15 |
| | | 908 | 939 | CTNS |
| | | 956 | 1154 | AAA |
| BI6000009 | 3460 | 1154 | 1311 | NIDO |
| | | 1310 | 1425 | AMOP |
| | | 1428 | 1610 | VWD |
| | | 40 | 344 | OSTEO |
| | | 66 | 122 | IGc1 |
| | | 69 | 273 | MA |
| | | 145 | 311 | MACPF |
| | | 205 | 328 | CBD_IV |
| | | 223 | 304 | BID_2 |
| | | 358 | 385 | PBD |
| | | 372 | 470 | B_lectin |
| | | 594 | 702 | THN |
| | | 715 | 763 | ChtBD3 |
| | | 895 | 967 | H15 |
| | | 909 | 940 | CTNS |
| | | 957 | 1155 | AAA |
| | | 1118 | 1264 | CLECT |
| | | 1350 | 1577 | PRP |
| | | 1363 | 1378 | DEFSN |
| | | 1365 | 1422 | ZnF_UBR1 |
| | | 1377 | 1409 | ANATO |
| | | 1469 | 1661 | LamG |
| | | 1471 | 1509 | RIIa |
| | | 1641 | 1665 | BTK |
| | | 1652 | 1750 | calpain_III |
| | | 1661 | 1689 | PTI |
| | | 1716 | 1794 | C4 |
| | | 1785 | 1826 | ZnF_TAZ |
| | | 1790 | 1820 | KAZAL |
| BI6000010 | 3461 | 161 | 318 | NIDO |
| | | 317 | 432 | AMOP |
| | | 435 | 617 | VWD |
| | | 841 | 873 | EGF |
| | | 880 | 921 | EGF |
| | | 1087 | 1124 | EGF |
| | | 1136 | 1158 | transmembrane |
| | | 125 | 271 | CLECT |
| | | 214 | 252 | ChtBD3 |
| | | 357 | 584 | PRP |
| | | 372 | 429 | ZnF_UBR1 |
| | | 476 | 668 | LamG |
| | | 478 | 516 | RIIa |
| | | 480 | 510 | CTNS |
| | | 648 | 672 | BTK |
| | | 659 | 757 | calpain_III |
| | | 668 | 696 | PTI |
| | | 717 | 852 | EPEND |
| | | 723 | 801 | C4 |
| | | 800 | 840 | FN1 |
| | | 806 | 861 | VWC |
| | | 821 | 892 | DISIN |
| | | 824 | 872 | EGF_Lam |
| | | 832 | 881 | C1 |
| | | 832 | 892 | FU |
| | | 836 | 960 | DM6 |
| | | 836 | 898 | PSA |
| | | 840 | 884 | LIM |
| | | 847 | 903 | FYVE |
| | | 851 | 872 | FES |
| | | 853 | 897 | AWS |
| | | 855 | 893 | ZnF_C4 |
| | | 857 | 892 | ShKT |
| | | 858 | 891 | BowB |
| | | 859 | 907 | ChtBD2 |
| | | 861 | 909 | VWC_out |
| | | 867 | 901 | BBOX |
| | | 872 | 905 | ANATO |
| | | 880 | 909 | ChtBD1 |
| | | 880 | 905 | DEFSN |
| | | 881 | 920 | GRAN |
| | | 886 | 909 | RING |
| | | 897 | 947 | Ubox |
| | | 904 | 941 | LRRNT |
| | | 975 | 1089 | RPR |
| | | 1021 | 1089 | CT |
| | | 1065 | 1124 | PSI |
| | | 1079 | 1103 | ZnF_C3H1 |
| | | 1087 | 1109 | FOLN |
| | | 1088 | 1124 | EGF_CA |
| | | 1089 | 1120 | SAPA |
| BI6000011 | 3462 | 12 | 34 | transmembrane |
| | | 110 | 267 | NIDO |
| | | 266 | 381 | AMOP |
| | | 384 | 566 | VWD |
| | | 790 | 822 | EGF |
| | | 829 | 870 | EGF |
| | | 1036 | 1073 | EGF |
| | | 1085 | 1107 | transmembrane |
| | | 74 | 220 | CLECT |
| | | 163 | 201 | ChtBD3 |
| | | 306 | 533 | PRP |
| | | 321 | 378 | ZnF_UBR1 |
| | | 425 | 617 | LamG |
| | | 427 | 465 | RIIa |
| | | 429 | 459 | CTNS |
| | | 597 | 621 | BTK |
| | | 608 | 706 | calpain_III |
| | | 617 | 645 | PTI |
| | | 666 | 801 | EPEND |
| | | 672 | 750 | C4 |
| | | 749 | 789 | FN1 |
| | | 755 | 810 | VWC |
| | | 770 | 841 | DISIN |
| | | 773 | 821 | EGF_Lam |
| | | 781 | 830 | C1 |
| | | 781 | 841 | FU |
| | | 785 | 909 | DM6 |
| | | 785 | 847 | PSA |
| | | 789 | 833 | LIM |
| | | 796 | 852 | FYVE |
| | | 800 | 821 | FES |
| | | 802 | 846 | AWS |
| | | 804 | 842 | ZnF_C4 |
| | | 806 | 841 | ShKT |
| | | 807 | 840 | BowB |
| | | 808 | 856 | ChtBD2 |
| | | 810 | 858 | VWC_out |
| | | 816 | 850 | BBOX |
| | | 821 | 854 | ANATO |
| | | 829 | 858 | ChtBD1 |
| | | 829 | 854 | DEFSN |
| | | 830 | 869 | GRAN |
| | | 835 | 858 | RING |
| | | 846 | 896 | Ubox |
| | | 853 | 890 | LRRNT |
| | | 924 | 1038 | RPR |
| | | 970 | 1038 | CT |
| | | 1014 | 1073 | PSI |
| | | 1028 | 1052 | ZnF_C3H1 |
| | | 1036 | 1058 | FOLN |
| | | 1037 | 1073 | EGF_CA |
| | | 1038 | 1069 | SAPA |

[0247] Intracellular, extracellular and nontransmembrane domains of the membrane associated molecules were predicted by the Kyte and Doolittle hydropatliy algorithm (Kyte, J. and Doolittle, R., J. Mol. Biol. 157: 105-132 (1982)), Chou and Fasman method to predict secondary structure (Chou and Fasman, Adv. Enz.:47, 45-147 (1978), and Goldman, Engelman and Steitz Transbilayer Helices Prediction algorithm (Engelman, D. M. et al. Annu. Rev. Biophys. Biophys. Chem. 15:321-353 (1986)).

[0248] Table 3 below provides portions of each membrane associated molecules which are predicted to be part of the intracellular, extracellular and nontransmembrane portions of the polypeptide.

TABLE 3

| | | Predicted | Predicted | Predicted Non- |
|---|---|---|---|---|
| SEQ ID | | Intracellular | Extracellular | Transmembrane |
| NO | BI Number | Regions | Regions | Regions |
| 3446 | BI6000000 | | 1-627 | 1-627 |
| 3447 | BI6000001 | 60-71; 132-151; | 1-36; 95-108; 175-197; | 1-36; 60-71; 95-108; |
| | | 221-405; 461-512 | 429-437 | 132-151; 175-197; 221-405; |
| | | | | 429-437; 461-512 |
| 3448 | BI6000002 | 52-160 | 1-28; | 1-28; 52-160 |
| 3449 | BI6000003 | 48-58; 121-140; | 1-24; 79-97; 164-199; | 1-24; 48-58; 79-97; 121-149; |
| | | 223-242; 290-316 | 166-169 | 164-199; 223-242; |
| | | | | 266-269; 290-316 |
| 3450 | BI6000004 | 49-60; 121-143; | 1-25; 84-97; 167-198; | 1-25; 49-60; 84-97; 121-143; |
| | | 222-240; 293-309 | 264-272 | 167-198; 222-240; |
| | | | | 266-272; 293-309 |
| 3451 | BI6000005 | 1-124 | 140 | 1-125; 140 |
| 3452 | BI6000006 | 54-57; 123-142; | 1-30; 81-99; 166-200; | 1-40; 54-57; 81-99; 123-142; |
| | | 224-235; 288-311 | 259-267 | 166-200; 224-235; |
| | | | | 259-267; 288-311 |
| 3458 | BI6000007 | 2152-2169 | 1-2128 | 1-2128; 2152-2169 |
| 3459 | BI6000008 | | 1-1255 | 1-1255 |
| 3460 | BI6000009 | | 1-1827 | 1-1827 |
| 3461 | BI6000010 | 1159-1176 | 1-1135 | 1-1135; 1159-1176 |
| 3462 | BI6000011 | 1-11; 1108-1125 | 35-1084 | 1-11; 35-1084; 1108-1125 |

[0249] In the context of the amino acids comprising the various structural and functional domains of a membrane associated molecule, the term “about” includes the particularly recited value and values larger or smaller by several (e.g., 10, 9, 8, 7, 6, 5, 4, 3, 2, or 1) amino acids. One of ordinary skill would appreciate that the amino acid residues constituting these domains may vary slightly (e.g., by about 1 to 15 residues) depending on the criteria used to define the domain. Thus in various embodiments, the extracellular domain of a colon associated polypeptide comprises, consists essentially of, or consists of, for example, the amino acid residues listed in Table 3 as comprising the extracellular domain.

### Treatment Methods Using Therapeutic Binding Molecules, in Particular, Membrane Associated Molecule-Specific Antibodies, or Immunospecific Fragments Thereof

[0250] One embodiment of the present invention provides methods for treating a hyperproliferative disease or disorder, e.g., cancer, a malignancy, a tumor, or a metastasis thereof, in an animal suffering from such disease or predisposed to contract such disease, the method comprising, consisting essentially of, or consisting of administering to the animal an effective amount of a binding molecule, more specifically a binding polypeptide, and even more specifically an antibody or immunospecific fragment thereof, that binds to a membrane associated molecule described herein. A specific embodiment of the present invention is a method of treatment as above, where the binding molecule binds specifically to at least one epitope of a polypeptide selected from the group consisting of SEQ ID NOs: 1288, 3446-3452 or SEQ ID NOs: 3458-3462.

[0251] A therapeutic binding molecule, e.g., a binding polypeptide, e.g., an antibody that binds specifically to a membrane associated molecule described herein, to be used in treatment methods disclosed herein can be prepared and used as a therapeutic agent that stops, reduces, prevents, or inhibits cellular activities involved in cellular hyperproliferation, e.g., cellular activities that induce the altered or abnormal pattern of vascularization that is often associated with hyperproliferative diseases or disorders. Characteristics of membrane associated molecules that are suitable targets for such binding molecules include membrane associated molecules located on the cell surface and disease- or disorder-specific expression; e.g., by cells of tumor-induced or inflammatory vascular tissue. Therapeutic binding molecules that bind specifically to such disease- or disorder-associated proteins are referred to herein as binding molecules or binding polypeptides. In certain embodiments, the binding molecule has at least one binding domain which specifically binds to a target molecule such as a polypeptide, e.g., a tumor-expressed or tumor-associated cell surface antigen.

[0252] Binding polypeptides include antibodies or immunospecific fragments thereof such as monoclonal, chimeric or humanized antibodies, domain-deleted antibodies, and fragments of antibodies that bind specifically to membrane associated molecules. The antibodies may be monovalent, bivalent, polyvalent, or bifunctional antibodies, and the antibody fragments include Fab F(ab′)₂, and Fv. Therapeutic binding molecules produced according to the invention also include fusion proteins that target a ligand or receptor of a membrane associated molecule described herein which is expressed on the surface of a disease-associated cell. Another type of binding polypeptide, also used herein as an immunogen, comprises a non-antigen-specific fragment of an immunoglobulin joined to the extracellular domain of a transmembrane membrane associated molecule, e.g., amino acid residues 1-627 of SEQ ID NO:3446, to generate a receptor:Ig fusion protein that antagonizes and neutralizes the cellular function of the target protein.

[0253] Therapeutic binding molecules according to the invention can be used in unlabeled or unconjugated form, or can be coupled or linked to cytotoxic moieties such as radiolabels and biochemical cytotoxins to produce agents that exert therapeutic effects.

[0254] In certain embodiments, a binding domain on a binding molecule or binding polypeptide is an antigen binding domain, and the binding polypeptide is an antibody, or immunospecific fragment thereof. An antigen binding domain is formed by antibody variable regions that vary from one antibody to another. Naturally occurring antibodies comprise at least two antigen binding domains, i.e., they are at least bivalent. As used herein, the term “antigen binding domain” includes a site that specifically binds an epitope on an antigen (e.g., a cell surface or soluble antigen). The antigen binding domain of an antibody typically includes at least a portion of an immunoglobulin heavy chain variable region and at least a portion of an immunoglobulin light chain variable region. The binding site formed by these variable regions determines the specificity of the antibody.

[0255] The present invention provides methods for treating various hyperproliferative disorders, e.g., by inhibiting tumor growth, in a mammal, comprising, consisting essentially of, or consisting of administering to the mammal an effective amount of a binding agent that binds specifically to a transmembrane protein identified by the invention as being specifically or predominantly present in tumor cells or tumor-associate tissue, preferably colon tumor cells or colon tumor-associated tissue.

[0256] In addition to antibodies and immunospecific fragments thereof, binding molecules of the present invention include a fusion protein, an agent which elicits a T-cell response specific for the membrane associated molecules, variants or fragments described herein, and a small molecule. Similar binding molecules may be used in the in vitro and in vivo diagnostic methods described in more detail below.

[0257] The present invention is more specifically directed to a method of treating a hyperproliferative disease, e.g., inhibiting or preventing tumor formation, tumor growth, tumor invasiveness, and/or metastasis formation, in an animal, e.g., a mammal, e.g., a human, comprising, consisting essentially of, or consisting of administering to an animal in need thereof an effective amount of a binding agent, e.g., a binding molecule, more specifically a binding polypeptide, and even more specifically an antibody or immunospecific fragment thereof, which specifically binds to one or more epitopes of a membrane associated molecule, variant polypeptide or fragment thereof described herein.

[0258] In particular, the present invention includes a method for treating a hyperproliferative disease, e.g., inhibiting tumor formation, tumor growth, tumor invasiveness, and/or metastasis formation in an animal, e.g., a mammal, e.g., a human patient, or prolonging survival of the animal, where the method comprises, consists essentially of, or consists of administering to an animal in need of such treatment an effective amount of a composition comprising, consisting essentially of, or consisting of, in addition to a pharmaceutically acceptable carrier, a binding molecule which specifically binds to a membrane associated molecule, variant or fragment thereof.

[0259] Such membrane associated molecules include the following polypeptides and their respective amino acid sequences:

SEQ ID NO: 3446

MFMAQISHCYPEYLSNFPQEVKDLLSCNHTVLDPDLRMTFCKALILLR
NKNLINPSSLLELFFELFRCHDKLLRKTLYTHIVTDIKINAKHKNNKV
NVVLQNFMYTMLRDSNATAAKMSLDVMIELYRRNIWNDAKTVNVIT
TACFSKVTKILVAALTFFLGKDEDEKQDSDSESEDDGPTARDLLVQYA
TGKKSSKNKKKLEKAMKVLKKQKKKKKPEVFNFSAIHLIHDPQDFAE
KLLKQLECCKERFEVKMMLMNLISRLVGIHELFLFNEYPFLQRFLQPH
QREVTKILLFAAQASHHLVPPEIIQSLLMTVANNFVTDKNSGEVMTVGI
NAIKEITARCPLAMTEELLQDLAQYKTHKDKNVMMSARTLIHLFRTLN
PQMLQKKFRGKPTEASIEARVQEYGELDAKDYIPGAEVLEVEKEENAE
NDEDGWESTSLSEEEDADGEWIDVQHSSDEEQQEISKKLNSMPMEER
KAKAAAISTSRVLTQEDFQKIRMAQMRKELDAAPGKSQKRKYIEDSD
EEPRGELLSLRDIERLHKKPKSDKETRLATAMAGKTDRKEFVRKKTKT
NPFSSSTNKEKKKQKNFMMMRYSQNVRSKNKRSFREKQLALRDALL
KKRKRMK

SEQ ID NO: 3447

MTSTCTNSTRESNSSHTCMPLSKMPISLAHGIIRSTVLVIFLAASFVGNI
VLALVLQRKPQLLQVTNRFIFNLLVTDLLQISLVAPWVVATSVPLFWP
LNSHFCTALVSLTHLFAFASVNTIVVVSVDRYLSIIHPLSYPSKMTQRR
GYLLLYGTWIVAILQSTPPLYGWGQAAFDERNALCSMIWGASPSYTIL
SVVSFIVIPLIVMIACYSVVFCAARRQHALLYNVKRHSLEVRVKDCVE
NEDEEGAEKKEEFQDESEFRRQHEGEVKAKEGRMEAKDGSLKAKEGS
TGTSESSVEARGSEEVRESSTVASDGSMEGKEGSTKVEENSMKADKG
RTEVNQCSIDLGEDDMEFGEDDINFSEDDVEAVNIPESLPPSRRNSNSN
PPLPRCYQCKAAKVIFIIIFSYVLSLGPYCFLAVLAVWVDVETQVPQWV
ITIIIWLFFLQCCIHPYVYGYMHKTIKKEIQDMLKKFFCKEKPPKEDSHP
DLPGTEGGTEGKIVPSYDSATFP

SEQ ID NO: 3448

MLSPHIYLPKCWNYRHEPLCLAVCFHFQLSLCFCCFILSLLCLCVLFNS
LFKTPRTCTASTGNIFWQASQEVIPKFGVYFSCLFFLLHTGESQSLSLFS
FPTWDGWWAAPKHRGNCRFLAGATLKDSFLSFPVVVPDPYVWHSLG
RAGICFSDLNLVFSC

SEQ ID NO: 3449

MKIANNTVVTEFILLGLTQSQDIQLLVFVLILIFYLIILPGNFLIIFTIR
SDPGLTAPLYFFLGNLAFLDASYSFIVAPRMLVDFFSEKKVISYRGCITQ
LFFLHFLGGGEGLLLVVMAFDRYIAICRPLHCSTVMNPRACYAMMLALWL
GGFVHSIIQVVLILRLPFCGPNQLDNFFCDVRQVIKLACTDMFVVELLMV
FNSGLMTLLCFLGLLASYAVILCHVRRAASEGKNKAMSMCTTRVIIILLM
FGPAIFIYMCPFRALPADKMVSLFHTVIFPLMNPMIYTLRNQEVKTSMKR
LLSRHVVCQVDFIIRN

SEQ ID NO: 3450

MGLGNESSLMDFILLGFSDHPRLEAVLFVFVLFFYLLTLVGNFTIIIISY
LDPPLHTPMYFFLSNLSLLDICFTTSLAPQTLVNLQRPRKTITYGGCVAQ
LYISLALGSTECILLADMALDRYIAVCKPLHYVVIMNPRLCQQLASISWL
SGLASSLIHATFTLQLPLCGNHRLDHFICEVPALLKLACVDTTVNELVLF
VVSVLFVVIPPALISISYGFITQAVLRIKSVEARHKAFSTCSSHLTVVII
FYGTIIYVYLQPSDSYAQDQGKFISLFYTMVTPTLNPIIYTLRNKDMKEA
LRKLLSGKL

SEQ ID NO: 3451

MLDLEKEKDLFSRQKGYLEEELDYRKQALDQAYLKIQDLEATLYTAL
QQEPGRRAGEALSEGQREDLQAAVEKVRRQILRQSREFDSQILRERME
LLQQAQQRIRELEDKLEFQKRHLKELEEKFLFLFLFFSLAFILWP

SEQ ID NO: 3452

MEKINNVTEFIFWGLSQSPEIEKVCFVVFSFFYIIILLGNLLIMLTVCLS
NLFKSPMYFFLSFLSFVDICYSSVTAPKMIVDLLAKDKTISYVGCMLQLL
GVHFFGCTEIFILTVMAYDRYVAICKPLHYMTIMNRETCNKMLLGTWVGG
FLHSIIQVALVVQLPFCGPNEIDHYFCDVHPVLKLACTETYIVGVVVTAN
SGTIALGSFVILLISYSIILVSLRKQSAEGRRKALSTCGSHIAMVVIFFG
PCTFMYMRPDTTFSEDKMVAVFYTIITPMLNPLIYTLRNAEVKNAMKKLW
GRNVFLEAKGK

SEQ ID NO: 3458

MKGARWRRVPWYSLSCLCLCLLPHVVPGTTEDTLITGSKTPAPVTSTGST
TATLEGQSTAASSRTSNQDISASSQNHQTKSTETTSKAQTDTLTQMMTST
LFSSPSVHNVMETVTQETAPPDEMTTSFPSSVTNTLMMTSKTITMTTSTD
STLGNTEETSTAGTESSTPVTSAVSITAGQEGQSRTTSWRTSIQDTSASS
QNHWTRSTQTTRESQTSTLTHRTTSTPSFSPSVHNVTGTVSQKTSPSGET
ATSSLCSVTNTSMMTSEKITVTTSTGSTLGNPGETSSVPVTGSLMPVTSA
ALVTVDPEGQSPATFSRTSTQDTTAFSKNHQTQSVETTRVSQINTLNTLT
PVTTSTVLSSPSGFNPSGTVSQETFPSGETTISSPSSVSNTFLVTSKVFR
MPISRDSTLGNTEETSLSVSGTISAITSKVSTIWWSDTLSTALSPSSLPP
KISTAFHTQQSEGAETTGRPHERSSFSPGVSQEIFTLHETTTWPSSFSSK
GHTTWSQTELPSTSTGAATRLVTGKPSTGAAGTIPRVPSKVSAIGEPGEP
TTYSSHSTTLPKTTGAGAQTQWTQETGTTGEALLSSPSYSVTQMIKTATS
PSSSPMLDRHTSQQITTAPSTNHSTIHSTSTSPQESPAVSQRGHTQAPQT
TQESQTTRSVSPMTDTKTVTTPGSSFTASGHSPSEIVPQDAPTISAATTF
APAPTGDGHTTQAPTTALQAAPSSHDATLGPSGGTSLSKTGALTLANSVV
STPGGPEGQWTSASASTSPDTAAAMTHTHQAESTEASGQTQTSEPASSGS
RTTSAGTATPSSSGASGTTPSGSEGISTSGETTRFSSNPSRDSHTTQSTT
ELLSASASHGAIPVSTGMASSIVPGTFHPTLSEASTAGRPTGQSSPTSPS
ASPQETAAISRMAQTQRTRTSRGSDTISLASQATDTFSTVPPTPPSITSS
GLTSPQTQTHTLSPSGSGKTFTTALISNATPLPVTSTSSASTGHATPLAV
SSATSASTVSSDSPLKMETSGMTTPSLKTDGGRRTATSPPPTTSQTIIST
IPSTAMHTRSTAAPIPILPERGVSLFPYGADAGDLEFVRRTVDFTSPLFK
PATGFPLGSSLRDSLYFTDNGQIIFPESDYQIFSYPNPLPTGFTGRDPVA
LVAPFWDDADFSTGRGTTFYQEYETFYGEHSLLVQQAESWIRKITNNGGY
KARWALKVTWVNAHAYPAQWTLGSNTYQAILSTDGSRSYALFLYQSGGMQ
WDVAQRSGKPVLMGFSSGDGFFENSPLMSQPVWERYRPDRFLNSNSGLQG
LQFYGLHRFERPNYRLECLQWLKSQPRWPSWGWNQVSCPCSWQQGRRDLR
FQPVSIGRWGLGSRQLCSFTSWRGGVCCSYGPWGEFREGWHVQRPWQLAQ
ELEPQSWCCRWNDKPYLCALYQQPRPHVGCATYRPPQPAWMFGDPHITTL
DGVSYTFNGLGDFLLVGAQDGNSSFLLQGRTAQTGSAQATNFIAFAAQYR
SSSLGPVTVQWLLEPHDAIRVLLDNQTVTFQPDHEDGGGQETFNATGVLL
SRNGSEASASFDGWATVSVIALSNILHSSASLPPEYQNRTEGLLGVWNNN
PEDDFRMPNGSTIPPGSPEEMLFHFGMTWQINGTGLLGKRNDQLPSNFTP
VFYSQLQKNSSWAEHLISNCDGDSSCJYDTLALRNASIGLHTREVSKNYE
QANATLNQYPPSINGGRVIEAYKGQTTLIQYTSNAEDANFTLRDSCTDLE
LFENGTLLWTPKSLEPFTLEILARSAKIGLASALQPRTVVCHCNAESQCL
YNQTSRVGNSSLEVAGCKCDGGTFGRYCEGSEDACEEPCFPSVHCVPGKG
CEACPPNLTGDGRHCAALGSSFLCQNQSCPVNYCYNQGHCYISQTLGCQP
MCTCPPAFTDSRCFLAGNNFSPTVNLELPLRVIQLLLSEEENASMAEVNA
SVAYRLGTLDMRAFLRNSQVERIDSAAPASGSPIQHWMVISEFQYRPRGP
VIDFLNNQLLAAVVEAFLYHVPRRSEEPRNDVVFQPISGEDVPDVTALNV
STLKAYFRCDGYKGYDLVYSPQSGFTCVSPCSRGYCDHGGQCQHLPSGPR
CSCVSFSIYTAWGEHCEHLSMKLDAFFGIFFGALGGLLLLGVGTFVVLRF
WGCSGARFSYFLNSAFALP

SEQ ID NO: 3459

MKGARWRRVPWVSLSCLCLCLLPHVVPGTTEDTLITGSKTPAPVTSTGST
TATLEGQSTAASSRTSNQDISASSQNHQTKSTETTSKAQTDTLTQMMTST
LFSSPSVHNVMETVTQETAPPDEMTTSFPSSVTNTLMMTSKTITMTTSTD
STLGNTEETSTAGTESSTPVTSAVSITAGQEGQSRTTSWRTSIQDTSASS
QNHWTRSTQTTRESQTSTLTHRTTSTPSFSPSVHNVTGTVSQKTSPSGET
ATSSLCSVTNTSMMTSEKITVTTSTGSTLGNPGETSSVPVTGSLMPVTSA
ALVTVDPEGQSPATFSRTSTQDTTAFSKNHQTQSVETTRVSQINTLNTLT
PVTTSTVLSSPSGFKPSGTVSQETFPSGETTISSPSSVSNTFLVTSKVFR
MPISRDSTLGNTEETSLSVSGTISAITSKVSTIWWSDTLSTALSPSSLPP
KISTAFHTQQSEGAETTGRPHERSSFSPGVSQEIFTLHETTTWPSSFSSK
GHTTWSQTELPSTSTGAATRLVTGKPSTGAAGTIPRVPSKVSAIGEPGEP
TTYSSHSTTLPKTTGAGAQTQWTQETGTTGEALLSSPSYSVTQMIKTATS
PSSSPMLDRHTSQQITTAPSTNHSTIHSTSTSPQESPAVSQRGHTQAPQT
TQESQTTRSVSPMTDTKTVTTPGSSFTASGHSPSEIVPQDAPTISAATTF
APAPTGDGHTTQAPTTALQAAPSSHDATLGPSGGTSLSKTGALTLANSVV
STPGGPEGQWTSASASTSPDTAAAMTHTHQAESTEASGQTQTSEPASSGS
RTTSAGTATPSSSGASGTTPSGSEGISTSGETTFSSNPSRDSHTTQSTTE
LLSASASHGAIPVSTGMASSIVPGTFHPTLSEASTAGRPTGQSSPTSPSA
SPQETAAISRMAQTQRTRTSRGSDTISLASQATDTFSTVPPTPPSITSSG
LTSPQTQTHTLSPSGSGKTFTTALISNATPLPVTSTSSASTGHATPLAVS
SATSASTVSSDSPLKMETSGMTTPSLKTDGGRRTATSPPPTTSQTIISTI
PSTAMHTRSTAAPIPILPERGVSLFPYGADAGDLEFVRRTVDFTSPLFKP
ATGFPLGSSLRDSLYFTDNGQIIFPESDYQIFSYPNPLPTGFTGRDPVAL
VAPFWDDADFSTGRGTTFYQEYETFYGEHSLLVQQAESWIRKITNNGGYK
ARWALKVTWVNAHAYPAQWTLGSNTYQAILSTDGSRSYALFLYQSGGMQW
DVAQL

SEQ ID NO: 3460

MKGARWRRVPWVSLSCLCLCLLPHVVPGTTEDTLITGSKTPAPVTSTGST
TATLEGQSTAASSRTSNQDISASSQNHQTKSTETTSKAQTDTLTQMMTST
LFSSPSVHNVMETVTQETAPPDEMTTSFPSSVTNTLMMTSKTITMTTSTD
STLGNTEETSTAGTESSTPVTSAVSITAGQEGQSRTTSWRTSIQDTSASS
QNHWTRSTQTTRESQTSTLTHRTTSTPSFSPSVHNVTGTVSQKTSPSGET
ATSSLCSVTNTSMMTSEKITVTTSTGSTLGNPGETSSVPVTGSLMPVTSA
ALVTVDPEGQSPATFSRTSTQDTTAFSKNHQTQSVETTRVSQINTLNTLT
PVTTSTVLSSPSGFNPSGTVSQETFPSGETTISSPSSVSNTFLVTSKVFR
MPISRDSTLGNTEETSLSVSGTISAITSKVSTIWWSDTLSTALSPSSLPP
KISTALFHTQQSEGAETTGRPHERSSFSPGVSQEIFTLHETTTWPSSFSS
KGHTTWSQTELPSTSTGAATRLVTGNPSTGAAGTIPRVPSKVSAIGEPGE
PTTYSSHSTTLPKTTGAGAQTQWTQETGTTGEALLSSPSYSVTQMIKTAT
SPSSSPMLDRHTSQQITTAPSTNHSTIHSTSTSPQESPAVSQRGHTQAPQ
TTQESQTTRSVSPMTDTKTVTTPGSSFTASGHSPSEIVPQDAPTISAATT
FAPAPTGDGHTTQAPTTALQAAPSSHDATLGPSGGTSLSKTGALTLANSV
VSTPGGPEGQWTSASASTSPDTAAAMTHTHQAESTEASGQTQTSEPASSG
SRTTSAGTATPSSSGASGTTPSGSEGISTSGETTRFSSNPSRDSHTTQST
TELLSASASHGAIPVSTGMASSIVPGTFHPTLSEASTAGRPTGQSSPTSP
SASPQETAAISRMAQTQRTRTSRGSDTISLASQATDTFSTVPPTPPSITS
SGLTSPQTQTHTLSPSGSGKTFTTALISNATPLPVTSTSSASTGHATPLA
VSSATSASTVSSDSPLKMETSGMTTPSLKTDGGRRTATSPPPTTSQTIIS
TIPSTAMHTRSTAAPIPILPERGVSLFPYGADAGDLEFVRRTVDPTSPLF
KPATGFPLGSSLRDSLYFTDNGQIIFPESDYQIFSYPNPLPTGFTGRDPV
ALVAPFWDDADFSTGRGTTFYQEYETFYGEHSLLVQQAESWIRKITNNGG
YKARWALKVTWVNAHAYPAQWTLGSNTYQAILSTDGSRSYALFLYQSGGM
QWDVAQRSGKPVLMGFSSGDGFFENSPLMSQPVWERYRPDRFLNSNSGLQ
GLQFYGLHREERPNYRLECLQWLKSQPRWPSWGWNQVSCPCSWQQGRRDL
RFQPVSIGRWGLGSRQLCSFTSWRGGVCCSYGPWGEFREGWHVQRPWQLA
QELEPQSWCCRWNDKPYLCALYQQRRPHVGCATYRPPQPAWMFGDPHITT
LDGVSYTFNGLGDFLLVGAQDGNSSFLLQGRTAQTGSAQATNFIAFAAQY
RSSSLGPVTVQWLLEPHDAIRVLLDNQTVTFQPDHEDGGGQETFNATGVL
LSRNGSEASASFDGWATVSVIALSNILHSSASLPPEYQNRTEGLLGVWNN
NPEDDFRMPNGSTIPPGSPEEMLFHFGMTWQINGTGLLGKRNDQLPSNFT
PVFYSQLQKNSSWAEHLISNCDGDSSCIYDTLALRNASIGLHTREVSKNY
EQANATLNQYPPSINGGRVIEAYKGQTTLIQYTSNAEDANFTLRDSCTDL
ELFENGTLLWTPKSLEPFTLEILARSAKIGLASALQPRTVVCHCNAESQC
LYNQTSRVGNSSLELWGALSCVRTSPAL

SEQ ID NO: 3461

MKGARWRRVPWVSLSCLCLCLLPHVVPGMTTPSLKTDGGRRTATSPPPTT
SQTIISTIPSTAMHTRSTAAPIPILPERGVSLFPYGADAGDLEFVRRTVD
FTSPLFKPATGFPLGSSLRDSLYFTDNGQIIFPESDYQIFSYPNPLPTGF
TGRDPVALVAPFWDDADFSTGRGTTFYQEYETFYGEHSLLVQQAESWIRK
ITNNGGYKARWALKVTWVNAHAYPAQWTLGSNTYQAILSTDGSRSYALFL
YQSGGMQWDVAQRSGKPVLMGFSSGDGYFENSPLMSQPVWERYRPDRPLN
SNSGLQGLQFYRLHREERPNYRLECLQWLKSQPRWPSWGWNQVSCPCSWQ
QGRRDLRFQPVSIGRWGLGSRQLCSFTSWRGGVCCSYGPWGEFRLGWHVQ
RPWQLAQELEPQSWCCRWNDKPYLCALYQQRRPHVGCATYRPPQPAWMFG
DPHITTLDGVSYTFNGLGDFLLVGAQDGNSSFLLQGRTAQTGSAQATNFI
AFAAQYRSSSLGPVTVQWLLEPHDAIRVLLDNQTVTFQPDHEDGGGQETF
NATGVLLSRNGSEVSASFDGWATVSVIALSNILHASASLPPEYQNRTEGL
LGVWNNNPEDDFRMPNGSTIPPGSPEEMLFHFGMTWQINGTGLLGKRNDQ
LPSNFTPVFYSQLQKNSSWAEHLISNCDGDSSCIYDTLALRNASIGLHTR
EVSKNYEQANATLNQYPPSINGGRVIEAYKGQTTLIQYTSNAEDANFTLR
DSCTDLELFENGTLLWTPKSLEPETLEILARSAKIGLASALQPRTVVCHC
NAESQCLYNQTSRVGNSSLEVAGCKCDGGTFGRYCEGSEDACEEPCFPSV
HCVPGKGCEACPPNLTGDGRHCAALGSSFLCQNQSCPVNYCYNQGHCYIS
QTLGCQPMCTCPPAFTDSRCFLAGNNFSPTVNLELPLRVIQLLLSEEENA
SMAEVNASVAYRLGTLDMRAFLRNSQVERIDSAAPASGSPIQHWMVISEF
QYRPRGPVIDFLNNQLLAAVVEAFLYHVPRRSEEPRNDVVFQPISGEDVR
DVTALNVSTLKAYFRCDGYKGYDLVYSPQSGFTCVSPCSRGYCDHGGQCQ
HLPSGPRCSCVSFSIYTAWGEHCEHLSMKLDAFFGIFFGALGGLLLLGVG
TFVVLRFWGCSGARFSYFLNSAEALP

SEQ ID NO: 3462

MKGARWRRVPWVSLSCLCLCLLPHVVPGVSLFPYGADAGDLEFVRRTVDF
TSPLFKPATGFPLGSSLRDSLYFTDNGQIIFPESDYQIFSYPNPLPTGFT
GRDPVALVAPFWDDADFSTGRGTTFYQEYETFYGEHSLLVQQAESWIRKI
TNNGGYKARWALKVTWVNAHAYPAQWTLGSNTYQAILSTDGSRSYALFLY
QSGGMQWDVAQRSGKPVLMGFSSGDGYFENSPLMSQPVWERYRPDRFLNS
NSGLQGLQFYRLHREERPNYRLECLQWLKSQPRWPSWGWNQVSCPCSWQQ
GRRDLRFQPVSIGRWGLGSRQLCSFTSWRGGVCCSYGPWGEFREGWHVQR
PWQLAQELEPQSWCCRWNPKPYLCALYQQRRPHVGCATYRPPQPAWMFGD
PHITTLDGVSYTFNGLGDFLLVGAQDGNSSFLLQGRTAQTGSAQATNFIA
IFAAQYRSSSLGPVTVQWLLEPHDAIRVLLDNQTVTFQPDHEDGGGQETF
NATGVLLSRNGSEVSASFDGWATVSVIALSNILHASASLPPEYQNRTEGL
LGVWNNNPEDDFRMPNGSTIPPGSPEEMLFHFGMTWQINGTGLLGKRNDQ
LPSNFTPVFYSQLQKNSSWAEHLISNCDGDSSCIYDTLALRNASIGLHTR
EVSKNYEQANATLNQYPPSINGGRVIEAYKGQTTLIQYTSNAEDANFTLR
DSCTDLELFENGTLLWTPKSLEPFTLEILARSAKIGLASALQPRTVVCHC
NAESQCLYNQTSRVGNSSLEVAGCKCDGGTFGRYCEGSEDACEEPCFPSV
HCVPGKGCEACPPNLTGDGRHCAALGSSFLCQNQSCPVNYCYNQGHCYIS
QTLGCQPMCTCPPAFTDSRCFLAGNNFSPTVNLELPLRVIQLLLSEEENA
SMAEVNASVAYRLGTLDMRAFLRNSQVERIDSAAPASGSPIQHWMVISEF
QYRPRGPVIDFLNNQLLAAVVEAFLYHVPRRSEEPRNDVVFQPISGEDVR
DVTALNVSTLKAYFRCDGYKGYDLVYSPQSGFTCVSPCSRGYCDHGGQCQ
HLPSGPRCSCVSFSIYTAWGEHCEHLSMKLDAFFGIFFGALGGLLLLGVG
TFVVLRFWGCSGARFSYFLNSAEALP

[0260] Polypeptides, variants, or fragments thereof of the present invention include polypeptides which are at least 70%, 75%, 80%, 85%, 90%, 95% or 100% identical to membrane associated molecules selected from the group consisting of SEQ ID NOs: 1288, 3446-3452 and SEQ ID NOs:3458-3462.

[0261] In the above embodiments, exemplary “fragments” of a colon tumor associate-polypeptide or variant polypeptide include but are not limited to: a fragment comprising, consisting essentially of, or consisting of a fragment selected from the group consisting of: amino acids 193-218 of SEQ ID NO:3446; amino acids 349-626 of SEQ ID NO:3446; amino acids 1-129 of SEQ ID NO:3447; amino acids 1-23 of SEQ ID NO:3447; amino acids 5-223 of SEQ ID NO:3447; amino acids 5-131 of SEQ ID NO:3447; amino acids 5-510 of SEQ ID NO:3447; amino acids 12-220 of SEQ ID NO:3447; amino acids 20-227 of SEQ ID NO:3447; amino acids 25-145 of SEQ ID NO:3447; amino acids 28-232 of SEQ ID NO:3447; amino acids 29-391 of SEQ ID NO:3447; amino acids 30-457 of SEQ ID NO:3447; amino acids 30-427 of SEQ ID NO:3447; amino acids 34-216 of SEQ ID NO:3447; amino acids 35-457 of SEQ ID NO:3447; amino acids 37-59 of SEQ ID NO:3447; amino acids 38-140 of SEQ ID NO:3447; amino acids 38-212 of SEQ ID NO:3447; amino acids 62-458 of SEQ ID NO:3447; amino acids 66-303 of SEQ ID NO:3447; amino acids 72-94 of SEQ ID NO:3447; amino acids 97-250 of SEQ ID NO:3447; amino acids 105-207 of SEQ ID NO:3447; amino acids 106-259 of SEQ ID NO:3447; amino acids 106-458 of SEQ ID NO:3447; amino acids 109-131 of SEQ ID NO:3447; amino acids 147-429 of SEQ ID NO:3447; amino acids 152-174 of SEQ ID NO:3447; amino acids 176-289 of SEQ ID NO:3447; amino acids 197-417 of SEQ ID NO:3447; amino acids 197-422 of SEQ ID NO:3447; amino acids 198-220 of SEQ ID NO:3447; amino acids 202-239 of SEQ ID NO:3447; amino acids 207-279 of SEQ ID NO:3447; amino acids 212-407 of SEQ ID NO:3447; amino acids 217-271 of SEQ ID NO:3447; amino acids 220-256 of SEQ ID NO:3447; amino acids 221-297 of SEQ ID NO:3447; amino acids 243-401 of SEQ ID NO:3447; amino acids 247-321 of SEQ ID NO:3447; amino acids 247-263 of SEQ ID NO:3447; amino acids 271-364 of SEQ ID NO:3447; amino acids 271-338 of SEQ ID NO:3447; amino acids 278-371 of SEQ ID NO:3447; amino acids 292-301 of SEQ ID NO:3447; amino acids 312-373 of SEQ ID NO:3447; amino acids 321-481 of SEQ ID NO:3447; amino acids 369-470 of SEQ ID NO:3447; amino acids 379-395 of SEQ ID NO:3447; amino acids 387-402 of SEQ ID NO:3447; amino acids 406-428 of SEQ ID NO:3447; amino acids 418-464 of SEQ ID NO:3447; amino acids 1-43 of SEQ ID NO:3448; amino acids 29-51 of SEQ ID NO:3448; amino acids 1-21 of SEQ ID NO:3449; amino acids 41-287 of SEQ ID NO:3449; amino acids 25-47 of SEQ ID NO:3449; amino acids 59-78 of SEQ ID NO:3449; amino acids 98-120 of SEQ ID NO:3449; amino acids 141-163 of SEQ ID NO:3449; amino acids 200-222 of SEQ ID NO:3449; amino acids 243-265 of SEQ ID NO:3449; amino acids 270-289 of SEQ ID NO:3449; amino acids 1-39 of SEQ ID NO:3450; amino acids 41-290 of SEQ ID NO:3450; amino acids 26-48 of SEQ ID NO:3450; amino acids 61-83 of SEQ ID NO:3450; amino acids 98-120 of SEQ ID NO:3450; amino acids 144-166 of SEQ ID NO:3450; amino acids 199-221 of SEQ ID NO:3450; amino acids 241-263 of SEQ ID NO:3450; amino acids 273-292 of SEQ ID NO:3450; amino acids 125-139 of SEQ ID NO:3451; amino acids 1-123 of SEQ ID NO:3451; amino acids 1-83 of SEQ ID NO:3451; amino acids 3-72 of SEQ ID NO:3451; amino acids 4-77 of SEQ ID NO:3451; amino acids 7-109 of SEQ ID NO:3451; amino acids 8-119 of SEQ ID NO:3451; amino acids 14-108 of SEQ ID NO:3451; amino acids 17-107 of SEQ ID NO:3451; amino acids 24-99 of SEQ ID NO:3451; amino acids 25-137 of SEQ ID NO:3451; amino acids 25-124 of SEQ ID NO:3451; amino acids 27-87 of SEQ ID NO:3451; amino acids 30-119 of SEQ ID NO:3451; amino acids 30-50 of SEQ ID NO:3451; amino acids 32-58 of SEQ ID NO:3451; amino acids 41-112 of SEQ ID NO:3451; amino acids 44-119 of SEQ ID NO:3451; amino acids 44-123 of SEQ ID NO:3451; amino acids 53-108 of SEQ ID NO:3451; amino acids 60-128 of SEQ ID NO:3451; amino acids 63-115 of SEQ ID NO:3451; amino acids 63-84 of SEQ ID NO:3451; amino acids 63-102 of SEQ ID NO:3451; amino acids 65-94 of SEQ ID NO:3451; amino acids 67-140 of SEQ ID NO:3451; amino acids 69-113 of SEQ ID NO:3451; amino acids 69-128 of SEQ ID NO:3451; amino acids 95-117 of SEQ ID NO:3451; amino acids 110-124 of SEQ ID NO:3451; amino acids 39-285 of SEQ ID NO:3452; amino acids 1-49 of SEQ ID NO:3452; amino acids 31-53 of SEQ ID NO:3452; amino acids 58-80 of SEQ ID NO:3452; amino acids 100-122 of SEQ ID NO:3452; amino acids 143-165 of SEQ ID NO:3452; amino acids 201-223 of SEQ ID NO:3452; amino acids 236-258 of SEQ ID NO:3452; amino acids 268-287 of SEQ ID NO:3452; amino acids 1154-1311 of SEQ ID NO:3458; amino acids 1310-1425 of SEQ ID NO:3458; amino acids 1428-1610 of SEQ ID NO:3458; amino acids 1834-1866 of SEQ ID NO:3458; amino acids 1873-1914 of SEQ ID NO:3458; amino acids 2080-2117 of SEQ ID NO:3458; amino acids 2129-2151 of SEQ ID NO:3458; amino acids 40-344 of SEQ ID NO:3458; amino acids 66-122 of SEQ ID NO:3458; amino acids 69-273 of SEQ ID NO:3458; amino acids 145-311 of SEQ ID NO:3458; amino acids 205-328 of SEQ ID NO:3458; amino acids 223-304 of SEQ ID NO:3458; amino acids 358-385 of SEQ ID NO:3458; amino acids 372-470 of SEQ ID NO:3458; amino acids 715-763 of SEQ ID NO:3458; amino acids 895-967 of SEQ ID NO:3458; amino acids 909-940 of SEQ ID NO:3458; amino acids 957-1155 of SEQ ID NO:3458; amino acids 1118-1264 of SEQ ID NO:3458; amino acids 1350-1577 of SEQ ID NO:3458; amino acids 1365-1422 of SEQ ID NO:3458; amino acids 1469-1661 of SEQ ID NO:3458; amino acids 1471-1509 of SEQ ID NO:3458; amino acids 1641-1665 of SEQ ID NO:3458; amino acids 1652-1750 of SEQ ID NO:3458; amino acids 1661-1689 of SEQ ID NO:3458; amino acids 1710-1845 of SEQ ID NO:3458; amino acids 1716-1794 of SEQ ID NO:3458; amino acids 1793-1833 of SEQ ID NO:3458; amino acids 1799-1854 of SEQ ID NO:3458; amino acids 1814-1885 of SEQ ID NO:3458; amino acids 1817-1865 of SEQ ID NO:3458; amino acids 1825-1874 of SEQ ID NO:3458; amino acids 1825-1885 of SEQ ID NO:3458; amino acids 1829-1953 of SEQ ID NO:3458; amino acids 1829-1891 of SEQ ID NO:3458; amino acids 1833-1877 of SEQ ID NO:3458; amino acids 1840-1896 of SEQ ID NO:3458; amino acids 1844-1865 of SEQ ID NO:3458; amino acids 1846-1890 of SEQ ID NO:3458; amino acids 1848-1886 of SEQ ID NO:3458; amino acids 1850-1885 of SEQ ID NO:3458; amino acids 1851-1884 of SEQ ID NO:3458; amino acids 1852-1900 of SEQ ID NO:3458; amino acids 1854-1902 of SEQ ID NO:3458; amino acids 1860-1894 of SEQ ID NO:3458; amino acids 1865-1898 of SEQ ID NO:3458; amino acids 1873-1898 of SEQ ID NO:3458; amino acids 1873-1902 of SEQ ID NO:3458; amino acids 1874-1913 of SEQ ID NO:3458; amino acids 1879-1902 of SEQ ID NO:3458; amino acids 1890-1940 of SEQ ID NO:3458; amino acids 1897-1934 of SEQ ID NO:3458; amino acids 1968-2082 of SEQ ID NO:3458; amino acids 2058-2117 of SEQ ID NO:3458; amino acids 2072-2096 of SEQ ID NO:3458; amino acids 2080-2102 of SEQ ID NO:3458; amino acids 2081-2117 of SEQ ID NO:3458; amino acids 2082-2113 of SEQ ID NO:3458; amino acids 1153-1255 of SEQ ID NO:3459; amino acids 23-163 of SEQ ID NO:3459; amino acids 40-344 of SEQ ID NO:3459; amino acids 66-122 of SEQ ID NO:3459; amino acids 69-273 of SEQ ID NO:3459; amino acids 145-311 of SEQ ID NO:3459; amino acids 205-328 of SEQ ID NO:3459; amino acids 223-304 of SEQ ID NO:3459; amino acids 358-385 of SEQ ID NO:3459; amino acids 372-470 of SEQ ID NO:3459; amino acids 594-702 of SEQ ID NO:3459; amino acids 715-763 of SEQ ID NO:3459; amino acids 743-857 of SEQ ID NO:3459; amino acids 831-968 of SEQ ID NO:3459; amino acids 894-966 of SEQ ID NO:3459; amino acids 908-939 of SEQ ID NO:3459; amino acids 956-1154 of SEQ ID NO:3459; amino acids 1154-1311 of SEQ ID NO:3460; amino acids 1310-1425 of SEQ ID NO:3460; amino acids 1428-1610 of SEQ ID NO:3460; amino acids 40-344 of SEQ ID NO:3460; amino acids 66-122 of SEQ ID NO:3460; amino acids 69-273 of SEQ ID NO:3460; amino acids 145-311 of SEQ ID NO:3460; amino acids 205-328 of SEQ ID NO:3460; amino acids 223-304 of SEQ ID NO:3460; amino acids 358-385 of SEQ ID NO:3460; amino acids 372-470 of SEQ ID NO:3460; amino acids 594-702 of SEQ ID NO:3460; amino acids 715-763 of SEQ ID NO:3460; amino acids 895-967 of SEQ ID NO:3460; amino acids 909-940 of SEQ ID NO:3460; amino acids 957-1155 of SEQ ID NO:3460; amino acids 1118-1264 of SEQ ID NO:3460; amino acids 1350-1577 of SEQ ID NO:3460; amino acids 1363-1378 of SEQ ID NO:3460; amino acids 1365-1422 of SEQ ID NO:3460; amino acids 1377-1409 of SEQ ID NO:3460; amino acids 1469-1661 of SEQ ID NO:3460; amino acids 1471-1509 of SEQ ID NO:3460; amino acids 1641-1665 of SEQ ID NO:3460; amino acids 1652-1750 of SEQ ID NO:3460; amino acids 1661-1689 of SEQ ID NO:3460; amino acids 1716-1794 of SEQ ID NO:3460; amino acids 1785-1826 of SEQ ID NO:3460; amino acids 1790-1820 of SEQ ID NO:3460; amino acids 161-318 of SEQ ID NO:3461; amino acids 317-432 of SEQ ID NO:3461; amino acids 435-617 of SEQ ID NO:3461; amino acids 841-873 of SEQ ID NO:3461; amino acids 880-921 of SEQ ID NO:3461; amino acids 1087-1124 of SEQ ID NO:3461; amino acids 1136-1158 of SEQ ID NO:3461; amino acids 125-271 of SEQ ID NO:3461; amino acids 214-252 of SEQ ID NO:3461; amino acids 357-584 of SEQ ID NO:3461; amino acids 372-429 of SEQ ID NO:3461; amino acids 476-668 of SEQ ID NO:3461; amino acids 478-516 of SEQ ID NO:3461; amino acids 480-510 of SEQ ID NO:3461; amino acids 648-672 of SEQ ID NO:3461; amino acids 659-757 of SEQ ID NO:3461; amino acids 668-696 of SEQ ID NO:3461; amino acids 717-852 of SEQ ID NO:3461; amino acids 723-801 of SEQ ID NO:3461; amino acids 800-840 of SEQ ID NO:3461; amino acids 806-861 of SEQ ID NO:3461; amino acids 821-892 of SEQ ID NO:3461; amino acids 824-872 of SEQ ID NO:3461; amino acids 832-881 of SEQ ID NO:3461; amino acids 832-892 of SEQ ID NO:3461; amino acids 836-960 of SEQ ID NO:3461; amino acids 836-898 of SEQ ID NO:3461; amino acids 840-884 of SEQ ID NO:3461; amino acids 847-903 of SEQ ID NO:3461; amino acids 851-872 of SEQ ID NO:3461; amino acids 853-897 of SEQ ID NO:3461; amino acids 855-893 of SEQ ID NO:3461; amino acids 857-892 of SEQ ID NO:3461; amino acids 858-891 of SEQ ID NO:3461; amino acids 859-907 of SEQ ID NO:3461; amino acids 861-909 of SEQ ID NO:3461; amino acids 867-901 of SEQ ID NO:3461; amino acids 872-905 of SEQ ID NO:3461; amino acids 880-909 of SEQ ID NO:3461; amino acids 880-905 of SEQ ID NO:3461; amino acids 881-920 of SEQ ID NO:3461; amino acids 886-909 of SEQ ID NO:3461; amino acids 897-947 of SEQ ID NO:3461; amino acids 904-941 of SEQ ID NO:3461; amino acids 975-1089 of SEQ ID NO:3461; amino acids 1021-1089 of SEQ ID NO:3461; amino acids 1065-1124 of SEQ ID NO:3461; amino acids 1079-1103 of SEQ ID NO:3461; amino acids 1087-1109 of SEQ ID NO:3461; amino acids 1088-1124 of SEQ ID NO:3461; amino acids 1089-1120 of SEQ ID NO:3461; amino acids 12-34 of SEQ ID NO:3462; amino acids 110-267 of SEQ ID NO:3462; amino acids 266-381 of SEQ ID NO:3462; amino acids 384-566 of SEQ ID NO:3462; amino acids 790-822 of SEQ ID NO:3462; amino acids 829-870 of SEQ ID NO:3462; amino acids 1036-1073 of SEQ BD NO:3462; amino acids 1085-1107 of SEQ ID NO:3462; amino acids 74-220 of SEQ ID NO:3462; amino acids 163-201 of SEQ ID NO:3462; amino acids 306-533 of SEQ ID NO:3462; amino acids 321-378 of SEQ ID NO:3462; amino acids 425-617 of SEQ ID NO:3462; amino acids 427-465 of SEQ ID NO:3462; amino acids 429-459 of SEQ ID NO:3462; amino acids 597-621 of SEQ ID NO:3462; amino acids 608-706 of SEQ ID NO:3462; amino acids 617-645 of SEQ ID NO:3462; amino acids 666-801 of SEQ ID NO:3462; amino acids 672-750 of SEQ ID NO:3462; amino acids 749-789 of SEQ ID NO:3462; amino acids 755-810 of SEQ ID NO:3462; amino acids 770-841 of SEQ ID NO:3462; amino acids 773-821 of SEQ ID NO:3462; amino acids 781-830 of SEQ ID NO:3462; amino acids 781-841 of SEQ ID NO:3462; amino acids 785-909 of SEQ ID NO:3462; amino acids 785-847 of SEQ ID NO:3462; amino acids 789-833 of SEQ ID NO:3462; amino acids 796-852 of SEQ ID NO:3462; amino acids 800-821 of SEQ ID NO:3462; amino acids 802-846 of SEQ ID NO:3462; amino acids 804-842 of SEQ ID NO:3462; amino acids 806-841 of SEQ ID NO:3462; amino acids 807-840 of SEQ ID NO:3462; amino acids 808-856 of SEQ ID NO:3462; amino acids 810-858 of SEQ ID NO:3462; amino acids 816-850 of SEQ ID NO:3462; amino acids 821-854 of SEQ ID NO:3462; amino acids 829-858 of SEQ ID NO:3462; amino acids 829-854 of SEQ ID NO:3462; amino acids 830-869 of SEQ ID NO:3462; amino acids 835-858 of SEQ ID NO:3462; amino acids 846-896 of SEQ ID NO:3462; amino acids 853-890 of SEQ ID NO:3462; amino acids 924-1038 of SEQ ID NO:3462; amino acids 970-1038 of SEQ ID NO:3462; amino acids 1014-1073 of SEQ ID NO:3462; amino acids 1028-1052 of SEQ ID NO:3462; amino acids 1036-1058 of SEQ ID NO:3462; amino acids 1037-1073 of SEQ ID NO:3462; amino acids 1038-1069 of SEQ ID NO:3462.

[0262] Corresponding polypeptides, variants or fragments thereof comprising, consisting essentially of, or consisting of polypeptides which are at least 70%, 75%, 80%, 85%, 90%, 95%, or 100% identical to the membrane associated molecule fragments disclosed above are also contemplated by the invention.

[0263] As known in the art, “sequence identity” between two polypeptides is determined by comparing the amino acid sequence of one polypeptide to the sequence of a second polypeptide. When discussed herein, whether any particular polypeptide is at least about 40%, 45%, 50%, 55%, 60%, 65%, 70%, 75%, 80%, 85%, 90% or 95% identical to another polypeptide can be determined using methods and computer programs/software known in the art such as, but not limited to, the BESTFIT program (Wisconsin Sequence Analysis Package, Version 8 for Unix, Genetics Computer Group, University Research Park, 575 Science Drive, Madison, Wis. 53711). BESTFIT uses the local homology algorithm of Smith and Waterman, Advances in Applied Mathematics 2:482-489 (1981), to find the best segment of homology between two sequences. When using BESTFIT or any other sequence alignment program to determine whether a particular sequence is, for example, 95% identical to a reference sequence according to the present invention, the parameters are set, of course, such that the percentage of identity is calculated over the full length of the reference polypeptide sequence and that gaps in homology of up to 5% of the total number of amino acids in the reference sequence are allowed.

[0264] In other embodiments, the present invention includes a method for treating a hyperproliferative disease, e.g., inhibiting tumor formation, tumor growth, tumor invasiveness, and/or metastasis formation in an animal, e.g., a human patient, where the method comprises administering to an animal in need of such treatment an effective amount of a composition comprising, consisting essentially of, or consisting of, in addition to a pharmaceutically acceptable carrier, a binding molecule which specifically binds to at least one epitope of a colon tumor-associate peptide described herein, where the epitope comprises, consists essentially of, or consists of at least about four to five amino acids amino acids of a polypeptide selected from the group consisting of SEQ ID NO:3446; SEQ ID NO:3447; SEQ ID NO:3448; SEQ ID NO:3449; SEQ ID NO:3450; SEQ ID NO:3451; SEQ ID NO:3452; SEQ ID NO:3458; SEQ ID NO:3459; SEQ ID NO:3460; SEQ ID NO:3461; SEQ ID NO:3462; and SEQ ID NO:1288, at least seven, at least nine, or between at least about 15 to about 30 amino acids of a polypeptide selected from the group consisting of SEQ ID NO:3446; SEQ ID NO:3447; SEQ ID NO:3448; SEQ ID NO:3449; SEQ ID NO:3450; SEQ ID NO:3451; SEQ ID NO:3452; SEQ ID NO:3458; SEQ ID NO:3459; SEQ ID NO:3460; SEQ ID NO:3461; SEQ ID NO:3462; and SEQ ID NO:1288. The amino acids of a given epitope of a polypeptide selected from the group consisting of SEQ ID NO:3446; SEQ ID NO:3447; SEQ ID NO:3448; SEQ ID NO:3449; SEQ ID NO:3450; SEQ ID NO:3451; SEQ ID NO:3452; SEQ ID NO:3458; SEQ ID NO:3459; SEQ ID NO:3460; SEQ ID NO:3461; SEQ ID NO:3462; and SEQ ID NO:1288 as described may be, but need not be contiguous. In certain embodiments, the at least one epitope of a membrane associated molecule comprises, consists essentially of, or consists of a non-linear epitope formed by the extracellular domain of a colon associated polypeptide as expressed on the surface of a cell. Thus, in certain embodiments the at least one epitope of a membrane associated molecule comprises, consists essentially of, or consists of at least 4, at least 5, at least 6, at least 7, at least 8, at least 9, at least 10, at least 15, at least 20, at least 25, between about 15 to about 30, or at least 10, 15, 20, 25, 30, 35, 40, 45, 50, 55, 60, 65, 70, 75, 80, 85, 90, 95, or 100 contiguous or non-contiguous amino acids of a polypeptide selected from the group consisting of SEQ ID NO:3446; SEQ ID NO:3447; SEQ ID NO:3448; SEQ ID NO:3449; SEQ ID NO:3450; SEQ ID NO:3451; SEQ ID NO:3452; SEQ ID NO:3458; SEQ ID NO:3459; SEQ ID NO:3460; SEQ ID NO:3461; SEQ ID NO:3462; and SEQ ID NO:1288, where non-contiguous amino acids form an epitope through protein folding.

[0265] In other embodiments, the present invention includes a method for treating a hyperproliferative disease, e.g., inhibiting tumor formation, tumor growth, tumor invasiveness, and/or metastasis formation in an animal, e.g., a human patient, where the method comprises administering to an animal in need of such treatment an effective amount of a composition comprising, consisting essentially of, or consisting of, in addition to a pharmaceutically acceptable carrier, a binding molecule which specifically binds to at least one epitope of a membrane associated molecule, where the epitope comprises, consists essentially of, or consists of, in addition to one, two, three, four, five, six or more contiguous or non-contiguous amino acids of a polypeptide selected from the group consisting of SEQ ID NO:3446; SEQ ID NO:3447; SEQ ID NO:3448; SEQ ID NO:3449; SEQ ID NO:3450; SEQ ID NO:3451; SEQ ID NO:3452; SEQ ID NO:3458; SEQ ID NO:3459; SEQ ID NO:3460; SEQ ID NO:3461; SEQ ID NO:3462; and SEQ ID NO:1288 as described above, an additional moiety which modifies the protein, e.g., a carbohydrate moiety may be included such that the binding molecule binds with higher affinity to modified target protein than it does to an unmodified version of the protein. Alternatively, the binding molecule does not bind the unmodified version of the target protein at all.

[0266] More specifically, the present invention provides a method of treating cancer in a human, comprising administering to a human in need of treatment a composition comprising an effective amount of a membrane associated molecule-specific antibody or immunospecific fragment thereof, and a pharmaceutically acceptable carrier. Types of cancer to be treated include, but are not limited to, colon cancer, lung cancer, breast cancer, pancreatic cancer, and prostate cancer.

[0267] A binding molecule for use in the present invention is typically a binding polypeptide, in particular an antibody or immunospecific fragment thereof. In certain embodiments, an antibody or fragment thereof binds specifically to at least one epitope of a membrane associated molecule or fragment or variant described above, i.e., binds to such an epitope more readily than it would bind to an unrelated, or random epitope; binds preferentially to at least one epitope of a membrane associated molecule or fragment or variant described above, i.e., binds to such an epitope more readily than it would bind to a related, similar, homologous, or analogous epitope; competitively inhibits binding of a reference antibody which itself binds specifically or preferentially to a certain epitope of a membrane associated molecule or fragment or variant described above; or binds to at least one epitope of a membrane associated molecule or fragment or variant described above with an affinity characterized by a dissociation constant K_{D} of less than about 5×10⁻² M, about 10⁻² M, about 5×10⁻³ M, about 10⁻³ M, about 5×10⁻⁴ M, about 10⁻⁴ M, about 5×10⁻⁵ M, about 10⁻⁵ M, about 5×10⁻⁶ M, about 10⁻⁶ M, about 5×10⁻⁷ M, about 10⁻⁷ M, about 5×10⁻⁸ M, about 10⁻⁸ M, about 5×10⁻⁹ M, about 10⁻⁹ M, about 5×10⁻¹⁰ M, about 10⁻¹⁰ M, about 5×10⁻¹¹ M, about 10⁻¹¹ M, about 5×10⁻¹² M, about 10⁻¹² M, about 5×10⁻¹³ M, about 10⁻¹³ M, about 5×10⁻¹⁴ M, about 10⁻¹⁴ M, about 5×10⁻¹⁵ M, or about 10⁻¹⁵ M. As used in the context of antibody binding dissociation constants, the term “about” allows for the degree of variation inherent in the methods utilized for measuring antibody affinity. For example, depending on the level of precision of the instrumentation used, standard error based on the number of samples measured, and rounding error, the term “about 10⁻² M” might include, for example, from 0.05 M to 0.005 M.

[0268] In specific embodiments, binding molecules, e.g., antibodies or immunospecific fragments thereof for use in the diagnostic and treatment methods disclosed herein bind membrane associated molecules or fragments or variants thereof with an off rate (k(off)) of less than or equal to 5×10⁻² sec⁻¹, 10⁻² sec⁻¹, 5×10⁻³ sec⁻¹ or 10⁻³ sec⁻¹. More preferably, binding molecules, e.g., antibodies or immunospecific fragments thereof for use in the diagnostic and treatment methods disclosed herein bind membrane associated molecules or fragments or variants thereof with an off rate (k(off)) of less than or equal to 5×10⁻⁴ sec⁻¹, 10⁻⁴ sec⁻¹, 5×10⁻⁵ sec⁻¹, or 10⁻⁵ sec⁻¹ 5×10⁻⁶ sec⁻¹, 10⁻⁶ sec⁻¹, 5×10⁻⁷ sec⁻¹ or 10⁻⁷ sec⁻¹.

[0269] In other embodiments, binding molecules, e.g., antibodies or immunospecific fragments thereof for use in the diagnostic and treatment methods disclosed herein bind membrane associated molecules or fragments or variants thereof with an on rate (k(on)) of greater than or equal to 10³ M⁻¹ sec⁻¹, 5×10³ M⁻¹ sec⁻¹, 10⁴ M⁻¹ sec⁻¹ or 5×10⁴ M⁻¹ sec⁻¹. More preferably, binding molecules, e.g., antibodies or immunospecific fragments thereof for use in the diagnostic and treatment methods disclosed herein bind membrane associated molecules or fragments or variants thereof with an on rate (k(on)) greater than or equal to 10⁵ M⁻¹ sec⁻¹, 5×10⁵ M⁻¹ sec⁻¹, 10⁶ M⁻¹ sec⁻¹, or 5×10⁶ M⁻¹ sec⁻¹ or 10⁷ M⁻¹ sec⁻¹.

### Diagnostic or Prognostic Methods Using Membrane Associated Molecule-Specific Binding Molecules

[0270] Membrane associated molecule-specific binding molecules, e.g., antibodies, or fragments, derivatives, or analogs thereof, can be used for diagnostic purposes to detect, diagnose, or monitor diseases, disorders, and/or conditions associated with the aberrant expression and/or activity of the tumor-associated polypeptides described herein.

[0271] Membrane associated molecule-specific binding molecules disclosed herein, e.g., antibodies or fragments thereof, are useful for diagnosis, treatment, prevention and/or prognosis of hyperproliferative disorders in mammals, preferably humans. Such disorders include, but are not limited to, cancer, neoplasms, tumors and/or as described under elsewhere herein, especially membrane associated molecule-associated cancers such as lung cancers, bronchogenic cancers, small cell lung cancers, non-small cell lung cancers, oat cell carcinomas, small cell undifferentiated carcinomas, squamous cell carcinomas, adenocarcinomas, large-cell undifferentiated carcinomas, pancreatic cancers, cervical cancers, ovarian cancers, liver cancers, bladder cancers, breast cancers, colon cancers, renal cancers, prostate cancers, testicular cancers, thyroid cancers, head and neck cancers, carcinoid tumors, adenoid cystic carcinomas, and hamartomas. In a preferred embodiment, such colon cancers includes, but are not limited to adenocarcinomas. In a preferred embodiment, such membrane associated molecule-associated cancers include, but are not limited to, lung cancers, non-small cell lung cancers, squamous cell carcinomas, adenocarcinomas, pancreatic cancers, cervical cancers, renal cancers, prostate cancers, and testicular cancers.

[0272] In particular, it is believed that certain tumor-associated tissues express significantly enhanced levels of the polypeptides, disclosed herein, when compared to corresponding “standard” levels. Indeed, the proteins described herein were identified based on their increased expression in malignant colon cells relative to nonmalignant colon cells.

[0273] For example, binding molecules, e.g., antibodies (and antibody fragments) directed against membrane associated molecules, variants and fragments thereof may be used to detect particular tissues expressing these proteins. These diagnostic assays may be performed in vivo or in vitro, such as, for example, on biopsy tissue or autopsy tissue.

[0274] Thus, the invention provides a diagnostic method useful during diagnosis of a cancers and other hyperproliferative disorders, which involves measuring the expression level of membrane associated molecules described herein in tissue and blood or other bodily fluids, which may contain secreted forms of membrane associated molecules, variant polypeptides, or fragments thereof, from an individual and comparing the measured expression level with a standard membrane associated molecule expression levels in normal tissue, whereby an increase in the expression level compared to the standard is indicative of a disorder.

[0275] With respect to cancer, the presence of a relatively high amount of membrane associated molecules in biopsied tissue from an individual may indicate the presence of a tumor or other malignant growth, may indicate a predisposition for the development of such malignancies or tumors, or may provide a means for detecting the disease prior to the appearance of actual clinical symptoms. A more definitive diagnosis of this type may allow health professionals to employ preventative measures or aggressive treatment earlier thereby preventing the development or further progression of the cancer.

[0276] Membrane associated molecule-specific binding molecules can be used to assay protein levels in a biological sample using classical immunohistological methods known to those of skill in the art (e.g., see Jalkanen, et al., J. Cell. Biol. 101:976-985 (1985); Jalkanen, et al., J. Cell Biol. 105:3087-3096 (1987)). Other antibody-based methods useful for detecting protein expression include immunoassays, such as the enzyme linked immunosorbent assay (ELISA) and the radioimmunoassay (RIA). Suitable antibody assay labels are known in the art and include enzyme labels, such as, glucose oxidase; radioisotopes, such as iodine (¹²⁵I, ¹²¹I), carbon (¹⁴C), sulfur (³⁵S), tritium (³H), indium (¹¹²In), and technetium (⁹⁹Tc); luminescent labels, such as luminol; and fluorescent labels, such as fluorescein and rhodamine, and biotin. Suitable assays are described in more detail elsewhere herein.

[0277] One aspect of the invention is a method for the in vivo detection or diagnosis of a hyperproliferative disease or disorder associated with aberrant expression of a membrane associated molecule, variant or fragment thereof in an animal, preferably a mammal and most preferably a human. In one embodiment, diagnosis comprises: a) administering (for example, parenterally, subcutaneously, or intraperitoneally) to a subject an effective amount of a labeled binding molecule, e.g., an antibody or fragment thereof, which specifically binds to a membrane associated molecule described herein; b) waiting for a time interval following the administering for permitting the labeled binding molecule to preferentially concentrate at sites in the subject where the membrane associated molecule is expressed (and for unbound labeled molecule to be cleared to background level); c) determining background level; and d) detecting the labeled molecule in the subject, such that detection of labeled molecule above the background level indicates that the subject has a particular disease or disorder associated with aberrant expression of a membrane associated molecule. Background level can be determined by various methods including comparing the amount of labeled molecule detected to a standard value previously determined for a particular system.

[0278] It will be understood in the art that the size of the subject and the imaging system used will determine the quantity of imaging moiety needed to produce diagnostic images. In the case of a radioisotope moiety, for a human subject, the quantity of radioactivity injected will normally range from about 5 to 20 millicuries of, e.g., ⁹⁹Tc. The labeled binding molecule, e.g., antibody or antibody fragment, will then preferentially accumulate at the location of cells which contain the specific protein. In vivo tumor imaging is described in S. W. Burchiel et al., “Immunopharmacokinetics of Radiolabeled Antibodies and Their Fragments.” (Chapter 13 in Tumor Imaging: The Radiochemical Detection of Cancer, S. W. Burchiel and B. A. Rhodes, eds., Masson Publishing Inc. (1982).

[0279] Depending on several variables, including the type of label used and the mode of administration, the time interval following the administration for permitting the labeled molecule to preferentially concentrate at sites in the subject and for unbound labeled molecule to be cleared to background level is 6 to 48 hours or 6 to 24 hours or 6 to 12 hours. In another embodiment the time interval following administration is 5 to 20 days or 7 to 10 days.

[0280] Presence of the labeled molecule can be detected in the patient using methods known in the art for in vivo scanning. These methods depend upon the type of label used. Skilled artisans will be able to determine the appropriate method for detecting a particular label. Methods and devices that may be used in the diagnostic methods of the invention include, but are not limited to, computed tomography (CT), whole body scan such as position emission tomography (PET), magnetic resonance imaging (MRI), and sonography.

[0281] In a specific embodiment, the binding molecule is labeled with a radioisotope and is detected in the patient using a radiation responsive surgical instrument (Thurston et al., U.S. Pat. No. 5,441,050). In another embodiment, the binding molecule is labeled with a fluorescent compound and is detected in the patient using a fluorescence responsive scanning instrument. In another embodiment, the binding molecule is labeled with a positron emitting metal and is detected in the patent using positron emission-tomography. In yet another embodiment, the binding molecule is labeled with a paramagnetic label and is detected in a patient using magnetic resonance imaging (MRI).

[0282] Antibody labels or markers for in vivo imaging of membrane associated molecule expression include those detectable by X-radiography, nuclear magnetic resonance imaging (NMR), MRI, CAT-scans or electron spin resonance imaging (ESR). For X-radiography, suitable labels include radioisotopes such as barium or cesium, which emit detectable radiation but are not overtly harmful to the subject. Suitable markers for NMR and ESR. include those with a detectable characteristic spin, such as deuterium, which may be incorporated into the antibody by labeling of nutrients for the relevant hybridoma. Where in vivo imaging is used to detect enhanced levels of membrane associated molecule expression for diagnosis in humans, it may be preferable to use human antibodies or “humanized” chimeric monoclonal antibodies. Such antibodies can be produced using techniques described herein or otherwise known in the art. For example methods for producing chimeric antibodies are known in the art. See, for review, Morrison, Science 229:1202 (1985); Oi et al., BioTechniques 4:214 (1986); Cabilly et al., U.S. Pat. No. 4,816,567; Taniguchi et al., EP 171496; Morrison et al., EP 173494; Neuberger et al., WO 8601533; Robinson et al., WO 8702671; Boulianne et al., Nature 312:643 (1984); Neuberger et al., Nature 314:268 (1985).

[0283] In a related embodiment to those described above, monitoring of an already diagnosed disease or disorder is carried out by repeating any one of the methods for diagnosing the disease or disorder, for example, one month after initial diagnosis, six months after initial diagnosis, one year after initial diagnosis, etc.

[0284] Where a diagnosis of a disorder, including diagnosis of a tumor, has already been made according to conventional methods, detection methods as disclosed herein are useful as a prognostic indicator, whereby patients continuing to exhibit enhanced membrane associated molecule expression will experience a worse clinical outcome relative to patients whose expression level decreases nearer the standard level.

[0285] By “assaying the expression level of the membrane associated molecule” is intended qualitatively or quantitatively measuring or estimating the level of the membrane associated molecule in a first biological sample either directly (e.g., by determining or estimating absolute protein level) or relatively (e.g., by comparing to the membrane associated molecule level in a second biological sample). Preferably, membrane associated molecule expression level in the first biological sample is measured or estimated and compared to a standard membrane associated molecule level, the standard being taken from a second biological sample obtained from an individual not having the disorder or being determined by averaging levels from a population of individuals not having the disorder. As will be appreciated in the art, once the “standard” membrane associated molecule level is known, it can be used repeatedly as a standard for comparison.

[0286] By “biological sample” is intended any biological sample obtained from an individual, cell line, tissue culture, or other source of cells potentially expressing the membrane associated molecule. As indicated, biological samples include tissue sources which contain cells potentially expressing the membrane associated molecule. Methods for obtaining tissue biopsies and body fluids from mammals are well known in the art.

[0287] In an additional embodiment, antibodies, or immunospecific fragments of antibodies directed to a conformational epitope of a membrane associated molecule may be used to quantitatively or qualitatively detect the presence of membrane associated molecules or conserved variants or peptide fragments thereof. This can be accomplished, for example, by immunofluorescence techniques employing a fluorescently labeled antibody coupled with light microscopic, flow cytometric, or fluorimetric detection.

[0288] Binding molecules for use in the diagnostic methods described above include any binding molecule which specifically binds to a membrane associated molecule. Such polypeptides include, but are not limited to, a membrane associated molecule comprising, consisting essentially of or consisting of a polypeptide selected from the group consisting of: SEQ ID NO:3446; SEQ ID NO:3447; SEQ ID NO:3448; SEQ ID NO:3449; SEQ ID NO:3450; SEQ ID NO:3451; SEQ ID NO:3452; SEQ ID NO:3458; SEQ ID NO:3459; SEQ ID NO:3460; SEQ ID NO:3461; SEQ ID NO:3462; and SEQ ID NO:1288. Corresponding polypeptides, variants or fragments thereof comprising, consisting essentially of, or consisting of polypeptides which are at least 70%, 75%, 80%, 85%, 90%, 95%, or 100% identical to the membrane associated molecules selected from the group consisting of SEQ ID NOs: 1288, 3446-3452 and 3458-3462 are also contemplated by the invention.

[0289] In the above embodiments, exemplary “fragments” of a colon tumor associate-polypeptide or variant polypeptides include but are not limited to: a fragment comprising, consisting essentially of, or consisting of a fragment selected from the group consisting of: amino acids 193-218 of SEQ ID NO:3446; amino acids 349-626 of SEQ ID NO:3446; amino acids 1-129 of SEQ ID NO:3447; amino acids 1-23 of SEQ ID NO:3447; amino acids 5-223 of SEQ ID NO:3447; amino acids 5-131 of SEQ ID NO:3447; amino acids 5-510 of SEQ ID NO:3447; amino acids 12-220 of SEQ ID NO:3447; amino acids 20-227 of SEQ ID NO:3447; amino acids 25-145 of SEQ ID NO:3447; amino acids 28-232 of SEQ ID NO:3447; amino acids 29-391 of SEQ ID NO:3447; amino acids 30-457 of SEQ ID NO:3447; amino acids 30-427 of SEQ ID NO:3447; amino acids 34-216 of SEQ ID NO:3447; amino acids 35-457 of SEQ ID NO:3447; amino acids 37-59 of SEQ ID NO:3447; amino acids 38-140 of SEQ ID NO:3447; amino acids 38-212 of SEQ ID NO:3447; amino acids 62-458 of SEQ ID NO:3447; amino acids 66-303 of SEQ ID NO:3447; amino acids 72-94 of SEQ ID NO:3447; amino acids 97-250 of SEQ ID NO:3447; amino acids 105-207 of SEQ ID NO:3447; amino acids 106-259 of SEQ ID NO:3447; amino acids 106-458 of SEQ ID NO:3447; amino acids 109-131 of SEQ ID NO:3447; amino acids 147-429 of SEQ ID NO:3447; amino acids 152-174 of SEQ ID NO:3447; amino acids 176-289 of SEQ ID NO:3447; amino acids 197-417 of SEQ ID NO:3447; amino acids 197-422 of SEQ ID NO:3447; amino acids 198-220 of SEQ ID NO:3447; amino acids 202-239 of SEQ ID NO:3447; amino acids 207-279 of SEQ ID NO:3447; amino acids 212-407 of SEQ ID NO:3447; amino acids 217-271 of SEQ ID NO:3447; amino acids 220-256 of SEQ ID NO:3447; amino acids 221-297 of SEQ ID NO:3447; amino acids 243-401 of SEQ ID NO:3447; amino acids 247-321 of SEQ ID NO:3447; amino acids 247-263 of SEQ ID NO:3447; amino acids 271-364 of SEQ ID NO:3447; amino acids 271-338 of SEQ ID NO:3447; amino acids 278-371 of SEQ ID NO:3447; amino acids 292-301 of SEQ ID NO:3447; amino acids 312-373 of SEQ ID NO:3447; amino acids 321-481 of SEQ ID NO:3447; amino acids 369-470 of SEQ ID NO:3447; amino acids 379-395 of SEQ ID NO:3447; amino acids 387-402 of SEQ ID NO:3447; amino acids 406-428 of SEQ ID NO:3447; amino acids 418-464 of SEQ ID NO:3447; amino acids 1-43 of SEQ ID NO:3448; amino acids 29-51 of SEQ ID NO:3448; amino acids 1-21 of SEQ ID NO:3449; amino acids 41-287 of SEQ ID NO:3449; amino acids 25-47 of SEQ ID NO:3449; amino acids 59-78 of SEQ ID NO:3449; amino acids 98-120 of SEQ ID NO:3449; amino acids 141-163 of SEQ ID NO:3449; amino acids 200-222 of SEQ ID NO:3449; amino acids 243-265 of SEQ ID NO:3449; amino acids 270-289 of SEQ ID NO:3449; amino acids 1-39 of SEQ ID NO:3450; amino acids 41-290 of SEQ ID NO:3450; amino acids 26-48 of SEQ ID NO:3450; amino acids 61-83 of SEQ ID NO:3450; amino acids 98-120 of SEQ ID NO:3450; amino acids 144-166 of SEQ ID NO:3450; amino acids 199-221 of SEQ ID NO:3450; amino acids 241-263 of SEQ ID NO:3450; amino acids 273-292 of SEQ ID NO:3450; amino acids 125-139 of SEQ ID NO:3451; amino acids 1-123 of SEQ ID NO:3451; amino acids 1-83 of SEQ ID NO:3451; amino acids 3-72 of SEQ ID NO:3451; amino acids 4-77 of SEQ ID NO:3451; amino acids 7-109 of SEQ ID NO:3451; amino acids 8-119 of SEQ ID NO:3451; amino acids 14-108 of SEQ ID NO:3451; amino acids 17-107 of SEQ ID NO:3451; amino acids 24-99 of SEQ ID NO:3451; amino acids 25-137 of SEQ ID NO:3451; amino acids 25-124 of SEQ ID NO:3451; amino acids 27-87 of SEQ ID NO:3451; amino acids 30-119 of SEQ ID NO:3451; amino acids 30-50 of SEQ ID NO:3451; amino acids 32-58 of SEQ ID NO:3451; amino acids 41-112 of SEQ ID NO:3451; amino acids 44-119 of SEQ ID NO:3451; amino acids 44-123 of SEQ ID NO:3451; amino acids 53-108 of SEQ ID NO:3451; amino acids 60-128 of SEQ ID NO:3451; amino acids 63-115 of SEQ ID NO:3451; amino acids 63-84 of SEQ ID NO:3451; amino acids 63-102 of SEQ ID NO:3451; amino acids 65-94 of SEQ ID NO:3451; amino acids 67-140 of SEQ ID NO:3451; amino acids 69-113 of SEQ ID NO:3451; amino acids 69-128 of SEQ ID NO:3451; amino acids 95-117 of SEQ ID NO:3451; amino acids 110-124 of SEQ ID NO:3451; amino acids 39-285 of SEQ ID NO:3452; amino acids 1-49 of SEQ ID NO:3452; amino acids 31-53 of SEQ BD NO:3452; amino acids 58-80 of SEQ ID NO:3452; amino acids 100-122 of SEQ ID NO:3452; amino acids 143-165 of SEQ ID NO:3452; amino acids 201-223 of SEQ ID NO:3452; amino acids 236-258 of SEQ ID NO:3452; amino acids 268-287 of SEQ ID NO:3452; amino acids 1154-1311 of SEQ ID NO:3458; amino acids 1310-1425 of SEQ ID NO:3458; amino acids 1428-1610 of SEQ ID NO:3458; amino acids 1834-1866 of SEQ ID NO:3458; amino acids 1873-1914 of SEQ ID NO:3458; amino acids 2080-2117 of SEQ ID NO:3458; amino acids 2129-2151 of SEQ ID NO:3458; amino acids 40-344 of SEQ ID NO:3458; amino acids 66-122 of SEQ ID NO:3458; amino acids 69-273 of SEQ ID NO:3458; amino acids 145-311 of SEQ ID NO:3458; amino acids 205-328 of SEQ ID NO:3458; amino acids 223-304 of SEQ ID NO:3458; amino acids 358-385 of SEQ ID NO:3458; amino acids 372-470 of SEQ ID NO:3458; amino acids 715-763 of SEQ ID NO:3458; amino acids 895-967 of SEQ ID NO:3458; amino acids 909-940 of SEQ ID NO:3458; amino acids 957-1155 of SEQ ID NO:3458; amino acids 1118-1264 of SEQ ID NO:3458; amino acids 1350-1577 of SEQ ID NO:3458; amino acids 1365-1422 of SEQ ID NO:3458; amino acids 1469-1661 of SEQ ID NO:3458; amino acids 1471-1509 of SEQ ID NO:3458; amino acids 1641-1665 of SEQ ID NO:3458; amino acids 1652-1750 of SEQ ID NO:3458; amino acids 1661-1689 of SEQ ID NO:3458; amino acids 1710-1845 of SEQ ID NO:3458; amino acids 1716-1794 of SEQ ID NO:3458; amino acids 1793-1833 of SEQ ID NO:3458; amino acids 1799-1854 of SEQ ID NO:3458; amino acids 1814-1885 of SEQ ID NO:3458; amino acids 1817-1865 of SEQ ID NO:3458; amino acids 1825-1874 of SEQ ID NO:3458; amino acids 1825-1885 of SEQ ID NO:3458; amino acids 1829-1953 of SEQ ID NO:3458; amino acids 1829-1891 of SEQ ID NO:3458; amino acids 1833-1877 of SEQ ID NO:3458; amino acids 1840-1896 of SEQ ID NO:3458; amino acids 1844-1865 of SEQ ID NO:3458; amino acids 1846-1890 of SEQ ID NO:3458; amino acids 1848-1886 of SEQ ID NO:3458; amino acids 1850-1885 of SEQ ID NO:3458; amino acids 1851-1884 of SEQ ID NO:3458; amino acids 1852-1900 of SEQ ID NO:3458; amino acids 1854-1902 of SEQ ID NO:3458; amino acids 1860-1894 of SEQ ID NO:3458; amino acids 1865-1898 of SEQ ID NO:3458; amino acids 1873-1898 of SEQ ID NO:3458; amino acids 1873-1902 of SEQ ID NO:3458; amino acids 1874-1913 of SEQ ID NO:3458; amino acids 1879-1902 of SEQ ID NO:3458; amino acids 1890-1940 of SEQ ID NO:3458; amino acids 1897-1934 of SEQ ID NO:3458; amino acids 1968-2082 of SEQ ID NO:3458; amino acids 2058-2117 of SEQ ID NO:3458; amino acids 2072-2096 of SEQ ID NO:3458; amino acids 2080-2102 of SEQ ID NO:3458; amino acids 2081-2117 of SEQ ID NO:3458; amino acids 2082-2113 of SEQ ID NO:3458; amino acids 1153-1255 of SEQ ID NO:3459; amino acids 23-163 of SEQ ID NO:3459; amino acids 40-344 of SEQ ID NO:3459; amino acids 66-122 of SEQ ID NO:3459; amino acids 69-273 of SEQ ID NO:3459; amino acids 145-311 of SEQ ID NO:3459; amino acids 205-328 of SEQ ID NO:3459; amino acids 223-304 of SEQ ID NO:3459; amino acids 358-385 of SEQ ID NO:3459; amino acids 372-470 of SEQ ID NO:3459; amino acids 594-702 of SEQ ID NO:3459; amino acids 715-763 of SEQ ID NO:3459; amino acids 743-857 of SEQ ID NO:3459; amino acids 831-968 of SEQ ID NO:3459; amino acids 894-966 of SEQ ID NO:3459; amino acids 908-939 of SEQ ID NO:3459; amino acids 956-1154 of SEQ ID NO:3459; amino acids 1154-1311 of SEQ ID NO:3460; amino acids 1310-1425 of SEQ ID NO:3460; amino acids 1428-1610 of SEQ ID NO:3460; amino acids 40-344 of SEQ ID NO:3460; amino acids 66-122 of SEQ ID NO:3460; amino acids 69-273 of SEQ ID NO:3460; amino acids 145-311 of SEQ ID NO:3460; amino acids 205-328 of SEQ ID NO:3460; amino acids 223-304 of SEQ ID NO:3460; amino acids 358-385 of SEQ ID NO:3460; amino acids 372-470 of SEQ ID NO:3460; amino acids 594-702 of SEQ ID NO:3460; amino acids 715-763 of SEQ ID NO:3460; amino acids 895-967 of SEQ ID NO:3460; amino acids 909-940 of SEQ ID NO:3460; amino acids 957-1155 of SEQ ID NO:3460; amino acids 1118-1264 of SEQ ID NO:3460; amino acids 1350-1577 of SEQ ID NO:3460; amino acids 1363-1378 of SEQ ID NO:3460; amino acids 1365-1422 of SEQ ID NO:3460; amino acids 1377-1409 of SEQ ID NO:3460; amino acids 1469-1661 of SEQ ID NO:3460; amino acids 1471-1509 of SEQ ID NO:3460; amino acids 1641-1665 of SEQ ID NO:3460; amino acids 1652-1750 of SEQ ID NO:3460; amino acids 1661-1689 of SEQ ID NO:3460; amino acids 1716-1794 of SEQ ID NO:3460; amino acids 1785-1826 of SEQ ID NO:3460; amino acids 1790-1820 of SEQ ID NO:3460; amino acids 161-318 of SEQ ID NO:3461; amino acids 317-432 of SEQ ID NO:3461; amino acids 435-617 of SEQ ID NO:3461; amino acids 841-873 of SEQ ID NO:3461; amino acids 880-921 of SEQ ID NO:3461; amino acids 1087-1124 of SEQ ID NO:3461; amino acids 1136-1158 of SEQ ID NO:3461; amino acids 125-271 of SEQ ID NO:3461; amino acids 214-252 of SEQ ID NO:3461; amino acids 357-584 of SEQ ID NO:3461; amino acids 372-429 of SEQ ID NO:3461; amino acids 476-668 of SEQ ID NO:3461; amino acids 478-516 of SEQ ID NO:3461; amino acids 480-510 of SEQ ID NO:3461; amino acids 648-672 of SEQ ID NO:3461; amino acids 659-757 of SEQ ID NO:3461; amino acids 668-696 of SEQ ID NO:3461; amino acids 717-852 of SEQ ID NO:3461; amino acids 723-801 of SEQ ID NO:3461; amino acids 800-840 of SEQ ID NO:3461; amino acids 806-861 of SEQ ID NO:3461; amino acids 821-892 of SEQ ID NO:3461; amino acids 824-872 of SEQ ID NO:3461; amino acids 832-881 of SEQ ID NO:3461; amino acids 832-892 of SEQ ID NO:3461; amino acids 836-960 of SEQ ID NO:3461; amino acids 836-898 of SEQ ID NO:3461; amino acids 840-884 of SEQ ID NO:3461; amino acids 847-903 of SEQ ID NO:3461; amino acids 851-872 of SEQ ID NO:3461; amino acids 853-897 of SEQ ID NO:3461; amino acids 855-893 of SEQ ID NO:3461; amino acids 857-892 of SEQ ID NO:3461; amino acids 858-891 of SEQ ID NO:3461; amino acids 859-907 of SEQ ID NO:3461; amino acids 861-909 of SEQ ID NO:3461; amino acids 867-901 of SEQ ID NO:3461; amino acids 872-905 of SEQ ID NO:3461; amino acids 880-909 of SEQ ID NO:3461; amino acids 880-905 of SEQ ID NO:3461; amino acids 881-920 of SEQ ID NO:3461; amino acids 886-909 of SEQ ID NO:3461; amino acids 897-947 of SEQ ID NO:3461; amino acids 904-941 of SEQ ID NO:3461; amino acids 975-1089 of SEQ ID NO:3461; amino acids 1021-1089 of SEQ ID NO:3461; amino acids 1065-1124 of SEQ ID NO:3461; amino acids 1079-1103 of SEQ ID NO:3461; amino acids 1087-1109 of SEQ ID NO:3461; amino acids 1088-1124 of SEQ ID NO:3461; amino acids 1089-1120 of SEQ ID NO:3461; amino acids 12-34 of SEQ ID NO:3462; amino acids 110-267 of SEQ ID NO:3462; amino acids 266-381 of SEQ ID NO:3462; amino acids 384-566 of SEQ ID NO:3462; amino acids 790-822 of SEQ ID NO:3462; amino acids 829-870 of SEQ ID NO:3462; amino acids 1036-1073 of SEQ ID NO:3462; amino acids 1085-1107 of SEQ ID NO:3462; amino acids 74-220 of SEQ ID NO:3462; amino acids 163-201 of SEQ ID NO:3462; amino acids 306-533 of SEQ ID NO:3462; amino acids 321-378 of SEQ ID NO:3462; amino acids 425-617 of SEQ ID NO:3462; amino acids 427-465 of SEQ ID NO:3462; amino acids 429-459 of SEQ ID NO:3462; amino acids 597-621 of SEQ ID NO:3462; amino acids 608-706 of SEQ ID NO:3462; amino acids 617-645 of SEQ ID NO:3462; amino acids 666-801 of SEQ ID NO:3462; amino acids 672-750 of SEQ ID NO:3462; amino acids 749-789 of SEQ ID NO:3462; amino acids 755-810 of SEQ ID NO:3462; amino acids 770-841 of SEQ ID NO:3462; amino acids 773-821 of SEQ ID NO:3462; amino acids 781-830 of SEQ ID NO:3462; amino acids 781-841 of SEQ ID NO:3462; amino acids 785-909 of SEQ ID NO:3462; amino acids 785-847 of SEQ ID NO:3462; amino acids 789-833 of SEQ ID NO:3462; amino acids 796-852 of SEQ ID NO:3462; amino acids 800-821 of SEQ ID NO:3462; amino acids 802-846 of SEQ ID NO:3462; amino acids 804-842 of SEQ ID NO:3462; amino acids 806-841 of SEQ ID NO:3462; amino acids 807-840 of SEQ ID NO:3462; amino acids 808-856 of SEQ ID NO:3462; amino acids 810-858 of SEQ ID NO:3462; amino acids 816-850 of SEQ ID NO:3462; amino acids 821-854 of SEQ ID NO:3462; amino acids 829-858 of SEQ ID NO:3462; amino acids 829-854 of SEQ ID NO:3462; amino acids 830-869 of SEQ ID NO:3462; amino acids 835-858 of SEQ ID NO:3462; amino acids 846-896 of SEQ ID NO:3462; amino acids 853-890 of SEQ ID NO:3462; amino acids 924-1038 of SEQ ID NO:3462; amino acids 970-1038 of SEQ ID NO:3462; amino acids 1014-1073 of SEQ ID NO:3462; amino acids 1028-1052 of SEQ ID NO:3462; amino acids 1036-1058 of SEQ ID NO:3462; amino acids 1037-1073 of SEQ ID NO:3462; amino acids 1038-1069 of SEQ ID NO:3462.

[0290] Additionally, exemplary fragments of the membrane associated molecules and variant polypeptides include but are limited to fragments of the extracellular domains of the membrane associated molecules described herein. For example, fragments selected from the group consisting of: amino acids 1-627 of SEQ ID NO:3446; amino acids 1-36 of SEQ ID NO:3447; amino acids 95-108 of SEQ ID NO:3447; amino acids 175-197 of SEQ ID NO:3447; amino acids 429-437 of SEQ ID NO:3447; amino acids 1-28 of SEQ ID NO:3448; amino acids 1-24 of SEQ ID NO:3449; amino acids 79-97 of SEQ ID NO:3449; amino acids 164-199 of SEQ ID NO:3449; amino acids 166-169 of SEQ ID NO:3449; amino acids 1-25 of SEQ ID NO:3450; amino acids 84-87 of SEQ ID NO:3450; amino acids 167-198 of SEQ ID NO:3450; amino acids 264-172 of SEQ ID NO:3450; amino acids 1-30 of SEQ ID NO:3452; amino acids 81-99 of SEQ ID NO:3452; amino acids 166-200 of SEQ ID NO:3452; amino acids 259-267 of SEQ ID NO:3452; amino acids 1-2128 of SEQ ID NO:3458; amino acids 1-1255 of SEQ ID NO:3459; amino acids 1-1827 of SEQ ID NO:3460; amino acids 1-1135 of SEQ ID NO:3461; and amino acids 35-1084 of SEQ ID NO:3462.

[0291] Additionally, exemplary fragments of the membrane associated molecules and variant polypeptides include but are limited to fragments of the intracellular domains of the membrane associated molecules described herein. For example, fragments selected from the group consisting of: amino acids 60-71 of SEQ ID NO:3447; amino acids 132-151 of SEQ ID NO:3447; amino acids 221-405 of SEQ ID NO:3447; amino acids 461-512 of SEQ ID NO:3447; amino acids 52-160 of SEQ ID NO:3448; amino acids 48-58 of SEQ ID NO:3449; amino acids 121-140 of SEQ ID NO:3449; amino acids 223-242 of SEQ ID NO:3449; amino acids 290-316 of SEQ ID NO:3449; amino acids 49-60 of SEQ ID NO:3450; amino acids 121-143 of SEQ ID NO:3450; amino acids 222-240 of SEQ ID NO:3450; amino acids 293-309 of SEQ ID NO:3450; amino acids 1-124 of SEQ ID NO:3451; amino acids 54-57 of SEQ ID NO:3452; amino acids 123-142 of SEQ ID NO:3452; amino acids 224-235 of SEQ ID NO:3452; amino acids 288-311 of SEQ ID NO:3452; amino acids 2152-2169 of SEQ ID NO:3458; amino acids 1159-1176 of SEQ ID NO:3461; amino acids 1-11 of SEQ ID NO:3462; and amino acids 1108-1125 of SEQ ID NO:3462.

[0292] Corresponding polypeptides, variants or fragments thereof comprising, consisting essentially of, or consisting of polypeptides which are at least 70%, 75%, 80%, 85%, 90%, 95%, or 100% identical to the membrane associated molecules selected from the group consisting of SEQ ID NO:3446; SEQ ID NO:3447; SEQ ID NO:3448; SEQ ID NO:3449; SEQ ID NO:3450; SEQ ID NO:3451; SEQ ID NO:3452; SEQ ID NO:3458; SEQ ID NO:3459; SEQ ID NO:3460; SEQ ID NO:3461; SEQ ID NO:3462; and SEQ ID NO:1288 are also contemplated by the invention.

[0293] Other binding molecules for use in the diagnostic methods described herein include binding molecules which specifically bind to at least one epitope of a membrane associated molecule where the epitope comprises, consists essentially of, or consists of at least about four to five amino acids amino acids of a membrane associated molecule, at least seven, at least nine, or between at least about 15 to about 30 amino acids of a membrane associated molecule. The amino acids of a given epitope of a membrane associated molecule as described may be, but need not be contiguous. In certain embodiments, the at least one epitope of a membrane associated molecule comprises, consists essentially of, or consists of a non-linear epitope formed by the extracellular domain of a membrane associated molecule as expressed on the surface of a cell. Thus, in certain embodiments the at least one epitope of a membrane associated molecule comprises, consists essentially of, or consists of at least 4, at least 5, at least 6, at least 7, at least 8, at least 9, at least 10, at least 15, at least 20, at least 25, between about 15 to about 30, or at least 10, 15, 20, 25, 30, 35, 40, 45, 50, 55, 60, 65, 70, 75, 80, 85, 90, 95, or 100 contiguous or non-contiguous amino acids of a membrane associated molecule, where non-contiguous amino acids form an epitope through protein folding.

[0294] Additional binding molecules include those which specifically bind to at least one epitope of a membrane associated molecule, where the epitope comprises, consists essentially of, or consists of, in addition to one, two, three, four, five, six or more contiguous or non-contiguous amino acids of a membrane associated molecule as described above, an additional moiety which modifies the protein, e.g., a carbohydrate moiety may be included such that the binding molecule binds with higher affinity to modified target protein than it does to an unmodified version of the protein. Alternatively, the binding molecule does not bind the unmodified version of the target protein at all.

[0295] Cancers that may be diagnosed, and/or prognosed using the methods described above include but are not limited to, colorectal cancer, breast cancer, ovarian cancer, prostate cancer, pancreatic cancer, lung cancer, liver cancer, uterine cancer, and/or skin cancer.

### Antibodies or Immunospecific Fragments Thereof

[0296] In one embodiment, a binding molecule for use in the methods of the invention is an antibody molecule, or immunospecific fragment thereof. Unless it is specifically noted, as used herein a “fragment thereof” in reference to an antibody refers to an immunospecific fragment, i.e., an antigen-specific fragment. In one embodiment, a binding molecule, e.g., an antibody of the invention is a bispecific binding molecule, binding polypeptide, or antibody, e.g., a bispecific antibody, minibody, domain deleted antibody, or fusion protein having binding specificity for more than one epitope, e.g., more than one antigen or more than one epitope on the same antigen. In one embodiment, a bispecific binding molecule, binding polypeptide, or antibody has at least one binding domain specific for at least one epitope on a target polypeptide disclosed herein, e.g., a membrane associated molecule. In another embodiment, a bispecific binding molecule, binding polypeptide, or antibody has at least one binding domain specific for an epitope on a target polypeptide and at least one target binding domain specific for a drug or toxin. In yet another embodiment, a bispecific binding molecule, binding polypeptide, or antibody has at least one binding domain specific for an epitope on a membrane associated molecule disclosed herein, and at least one binding domain specific for a prodrug. A bispecific binding molecule, binding polypeptide, or antibody may be a tetravalent antibody that has two target binding domains specific for an epitope of a target polypeptide disclosed herein and two target binding domains specific for a second target. Thus, a tetravalent bispecific binding molecule, binding polypeptide, or antibody may be bivalent for each specificity.

[0297] Antibody binding molecules for use in the treatment methods of the present invention, as known by those of ordinary skill in the art, can comprise a constant region which mediates one or more effector functions. For example, binding of the C1 component of complement to an antibody constant region may activate the complement system. Activation of complement is important in the opsonisation and lysis of cell pathogens. The activation of complement also stimulates the inflammatory response and may also be involved in autoimmune hypersensitivity. Further, antibodies bind to receptors on various cells via the Fc region, with a Fc receptor binding site on the antibody Fc region binding to a Fc receptor (FcR) on a cell. There are a number of Fc receptors which are specific for different classes of antibody, including IgG (gamma receptors), IgE (epsilon receptors), IgA (alpha receptors) and IgM (mu receptors). Binding of antibody to Fc receptors on cell surfaces triggers a number of important and diverse biological responses including engulfment and destruction of antibody-coated particles, clearance of immune complexes, lysis of antibody-coated target cells by killer cells (called antibody-dependent cell-mediated cytotoxicity, or ADCC), release of inflammatory mediators, placental transfer and control of immunoglobulin production.

[0298] In certain embodiments, methods of treating hyperproliferative diseases according to the present invention comprise administration of an antibody, or immunospecific fragment thereof, in which at least a fraction of one or more of the constant region domains has been deleted or otherwise altered so as to provide desired biochemical characteristics such as reduced effector functions, the ability to non-covalently dimerize, increased ability to localize at the site of a tumor, reduced serum half-life, or increased serum half-life when compared with a whole, unaltered antibody of approximately the same immunogenicity. For example, certain antibodies for use in the diagnostic and treatment methods described herein are domain deleted antibodies which comprise a polypeptide chain similar to an immunoglobulin heavy chain, but which lack at least a portion of one or more heavy chain domains. For instance, in certain antibodies, one entire domain of the constant region of the modified antibody will be deleted, for example, all or part of the C_{H}2 domain will be deleted.

[0299] In certain antibodies or immunospecific fragments thereof for use in the diagnostic and therapeutic methods described herein, the Fc portion may be mutated to decrease effector function using techniques known in the art. For example, the deletion or inactivation (through point mutations or other means) of a constant region domain may reduce Fc receptor binding of the circulating modified antibody thereby increasing tumor localization. In other cases it may be that constant region modifications consistent with the instant invention moderate complement binding and thus reduce the serum half life and nonspecific association of a conjugated cytotoxin. Yet other modifications of the constant region may be used to modify disulfide linkages or oligosaccharide moieties that allow for enhanced localization due to increased antigen specificity or antibody flexibility. The resulting physiological profile, bioavailability and other biochemical effects of the modifications, such as tumor localization, biodistribution and serum half-life, may easily be measured and quantified using well know immunological techniques without undue experimentation.

[0300] Modified forms of antibodies or immunospecific fragments thereof for use in the diagnostic and therapeutic methods disclosed herein can be made from whole precursor or parent antibodies using techniques known in the art. Exemplary techniques are discussed in more detail herein.

[0301] In certain embodiments both the variable and constant regions of membrane associated molecule-specific antibodies or immunospecific fragments thereof for use in the diagnostic and treatment methods disclosed herein are fully human. Fully human antibodies can be made using techniques that are known in the art and as described herein. For example, fully human antibodies against a specific antigen can be prepared by administering the antigen to a transgenic animal which has been modified to produce such antibodies in response to antigenic challenge, but whose endogenous loci have been disabled. Exemplary techniques that can be used to make such antibodies are described in U.S. Pat. Nos. 6,150,584; 6,458,592; 6,420,140. Other techniques are known in the art. Fully human antibodies can likewise be produced by various display technologies, e.g., phage display or other viral display systems, as described in more detail elsewhere herein.

[0302] Binding molecules, e.g., binding polypeptides, e.g., membrane associated molecule-specific antibodies or immunospecific fragments thereof for use in the diagnostic and treatment methods disclosed herein can be made or manufactured using techniques that are known in the art. In certain embodiments, antibody molecules or fragments thereof are “recombinantly produced,” i.e., are produced using recombinant DNA technology. Exemplary techniques for making antibody molecules or fragments thereof are discussed in more detail elsewhere herein.

[0303] Binding molecules, e.g., binding polypeptides, e.g., membrane associated molecule-specific antibodies or immunospecific fragments thereof for use in the diagnostic and treatment methods disclosed herein include derivatives that are modified, e.g., by the covalent attachment of any type of molecule to the antibody such that covalent attachment does not prevent the antibody from specifically binding to its cognate epitope. For example, but not by way of limitation, the antibody derivatives include antibodies that have been modified, e.g., by glycosylation, acetylation, pegylation, phosphorylation, amidation, derivatization by known protecting/blocking groups, proteolytic cleavage, linkage to a cellular ligand or other protein, etc. Any of numerous chemical modifications may be carried out by known techniques, including, but not limited to specific chemical cleavage, acetylation, formylation, metabolic synthesis of tunicamycin, etc. Additionally, the derivative may contain one or more non-classical amino acids.

[0304] In preferred embodiments, a binding molecule, e.g., a binding polypeptide, e.g., a membrane associated molecule-specific antibody or immunospecific fragment thereof for use in the diagnostic and treatment methods disclosed herein will not elicit a deleterious immune response in the animal to be treated, e.g., in a human. In one embodiment, binding molecules, e.g., binding polypeptides, e.g., membrane associated molecule-specific antibodies or immunospecific fragments thereof for use in the diagnostic and treatment methods disclosed herein be modified to reduce their immunogenicity using art-recognized techniques. For example, antibodies can be humanized, primatized, deimmunized, or chimeric antibodies can be made. These types of antibodies are derived from a non-human antibody, typically a murine or primate antibody, that retains or substantially retains the antigen-binding properties of the parent antibody, but which is less immunogenic in humans. This may be achieved by various methods, including (a) grafting the entire non-human variable domains onto human constant regions to generate chimeric antibodies; (b) grafting at least a part of one or more of the non-human complementarity determining regions (CDRs) into a human framework and constant regions with or without retention of critical framework residues; or (c) transplanting the entire non-human variable domains, but “cloaking” them with a human-like section by replacement of surface residues. Such methods are disclosed in Morrison et al., Proc. Natl. Acad. Sci. 81:6851-6855 (1984); Morrison et al., Adv. Immunol. 44:65-92 (1988); Verhoeyen et al., Science 239:1534-1536 (1988); Padlan, Molec. Immun. 28:489-498 (1991); Padlan, Molec. Immun. 31:169-217 (1994), and U.S. Pat. Nos. 5,585,089, 5,693,761, 5,693,762, and 6,190,370, all of which are hereby incorporated by reference in their entirety.

[0305] De-immunization can also be used to decrease the immunogenicity of an antibody. As used herein, the term “de-immunization” includes alteration of an antibody to modify T cell epitopes (see, e.g., WO9852976A1, WO0034317A2). For example, V_{H} and V_{L} sequences from the starting antibody are analyzed and a human T cell epitope “map” from each V region showing the location of epitopes in relation to complementarity-determining regions (CDRs) and other key residues within the sequence. Individual T cell epitopes from the T cell epitope map are analyzed in order to identify alternative amino acid substitutions with a low risk of altering activity of the final antibody. A range of alternative V_{H} and V_{L} sequences are designed comprising combinations of amino acid substitutions and these sequences are subsequently incorporated into a range of binding polypeptides, e.g., membrane associated molecule-specific antibodies or immunospecific fragments thereof for use in the diagnostic and treatment methods disclosed herein, which are then tested for function. Typically, between 12 and 24 variant antibodies are generated and tested. Complete heavy and light chain genes comprising modified V and human C regions are then cloned into expression vectors and the subsequent plasmids introduced into cell lines for the production of whole antibody. The antibodies are then compared in appropriate biochemical and biological assays, and the optimal variant is identified.

[0306] In the therapeutic methods described herein, administration is to an animal, e.g., a human, in need of treatment for cancer or other hyperproliferative disorder. For example, a binding molecule, e.g., a binding polypeptide, e.g., a membrane associated molecule-specific antibody or immunospecific fragment thereof may be administered to a human patient diagnosed with a tumor, other cancerous lesion, or other hyperproliferative disorder, a human patient who has been treated for cancer and is in remission, but is in need of further chronic treatment to prevent recurrence or spread of cancer, a human who exhibits early warning signs for a certain cancer or hyperproliferative disorder and is a candidate for preventative treatment, or preventatively to a human who is genetically predisposed to contract a certain cancer.

[0307] The methods of treatment of hyperproliferative disorders as described herein are typically tested in vitro, and then in vivo in an acceptable animal model, for the desired therapeutic or prophylactic activity, prior to use in humans. Suitable animal models, including transgenic animals, are well known to those of ordinary skill in the art. For example, in vitro assays to demonstrate the therapeutic utility of binding molecule described herein include the effect of a binding molecule on a cell line or a patient tissue sample. The effect of the binding molecule on the cell line and/or tissue sample can be determined utilizing techniques known to those of skill in the art including, but not limited to, apoptosis assays and cell lysis assays. In accordance with the invention, in vitro assays which can be used to determine whether administration of a specific binding molecule is indicated, include in vitro cell culture assays in which a patient tissue sample is grown in culture, and exposed to or otherwise administered a compound, and the effect of such compound upon the tissue sample is observed.

[0308] Antibodies or fragments thereof for use as therapeutic binding molecules may be generated by any suitable method known in the art. Polyclonal antibodies to an antigen of interest can be produced by various procedures well known in the art. For example, a binding molecule, e.g., a binding polypeptide, e.g., a membrane associated molecule-specific antibody or immunospecific fragment thereof can be administered to various host animals including, but not limited to, rabbits, mice, rats, etc. to induce the production of sera containing polyclonal antibodies specific for the antigen. Various adjuvants may be used to increase the immunological response, depending on the host species, and include but are not limited to, Freund's (complete and incomplete), mineral gels such as aluminum hydroxide, surface active substances such as lysolecithin, pluronic polyols, polyanions, peptides, oil emulsions, keyhole limpet hemocyanins, dinitrophenol, and potentially useful human adjuvants such as BCG (bacille Calmette-Guerin) and Corynebacterium parvum. Such adjuvants are also well known in the art.

[0309] Monoclonal antibodies can be prepared using a wide variety of techniques known in the art including the use of hybridoma, recombinant, and phage display technologies, or a combination thereof. For example, monoclonal antibodies can be produced using hybridoma techniques including those known in the art and taught, for example, in Harlow et al., Antibodies: A Laboratory Manual, Cold Spring Harbor Laboratory Press, 2nd ed. (1988); Hammerling et al., in: Monoclonal Antibodies and T-Cell Hybridomas Elsevier, N.Y., 563-681 (1981) (said references incorporated by reference in their entireties). The term “monoclonal antibody” as used herein is not limited to antibodies produced through hybridoma technology. The term “monoclonal antibody” refers to an antibody that is derived from a single clone, including any eukaryotic, prokaryotic, or phage clone, and not the method by which it is produced. Thus, the term “monoclonal antibody” is not limited to antibodies produced through hybridoma technology. Monoclonal antibodies can be prepared using a wide variety of techniques known in the art including the use of hybridoma and recombinant and phage display technology.

[0310] Using art recognized protocols, in one example, antibodies are raised in mammals by multiple subcutaneous or intraperitoneal injections of the relevant antigen (e.g., purified tumor associated antigens such as a membrane associated molecules, varient polypeptides, fragments thereof, or cells or cellular extracts comprising such antigens) and an adjuvant. This immunization typically elicits an immune response that comprises production of antigen-reactive antibodies from activated splenocytes or lymphocytes. While the resulting antibodies may be harvested from the serum of the animal to provide polyclonal preparations, it is often desirable to isolate individual lymphocytes from the spleen, lymph nodes or peripheral blood to provide homogenous preparations of monoclonal antibodies (MAbs). Preferably, the lymphocytes are obtained from the spleen.

[0311] In this well known process (Kohler et al., Nature 256:495 (1975)) the relatively short-lived, or mortal, lymphocytes from a mammal which has been injected with antigen are fused with an immortal tumor cell line (e.g. a myeloma cell line), thus, producing hybrid cells or “hybridomas” which are both immortal and capable of producing the genetically coded antibody of the B cell. The resulting hybrids are segregated into single genetic strains by selection, dilution, and regrowth with each individual strain comprising specific genes for the formation of a single antibody. They produce antibodies which are homogeneous against a desired antigen and, in reference to their pure genetic parentage, are termed “monoclonal.”

[0312] Hybridoma cells thus prepared are seeded and grown in a suitable culture medium that preferably contains one or more substances that inhibit the growth or survival of the unfused, parental myeloma cells. Those skilled in the art will appreciate that reagents, cell lines and media for the formation, selection and growth of hybridomas are commercially available from a number of sources and standardized protocols are well established. Generally, culture medium in which the hybridoma cells are growing is assayed for production of monoclonal antibodies against the desired antigen. Preferably, the binding specificity of the monoclonal antibodies produced by hybridoma cells is determined by in vitro assays such as immunoprecipitation, radioimmunoassay (RIA) or enzyme-linked immunoabsorbent assay (ELISA). After hybridoma cells are identified that produce antibodies of the desired specificity, affinity and/or activity, the clones may be subcloned by limiting dilution procedures and grown by standard methods (Goding, Monoclonal Antibodies: Principles and Practice, Academic Press, pp 59-103 (1986)). It will further be appreciated that the monoclonal antibodies secreted by the subclones may be separated from culture medium, ascites fluid or serum by conventional purification procedures such as, for example, protein-A, hydroxylapatite chromatography, gel electrophoresis, dialysis or affinity chromatography.

[0313] The polypeptide sequence of the membrane associated molecules of the present invention was determined via mass spectroscopy. Accordingly, the source of antigen (e.g. a membrane associated molecule, variant polypeptide, or fragment thereof may be prepared according to methods well known in the art. For example, the protein may be isolated from large amounts of the disease-associated tissue, smaller fragments of the membrane associated molecule or variant polypeptide (about 10 to 125 amino acids) can be produced synthetically, the corresponding polynucleotide which encodes the membrane associated molecule can also be isolated and cloned according to methods known in the art.

[0314] Finally, small polynucleotide fragments can be produced based on deducing the polynucleotide sequence from the amino acid sequence. For example a polynucleotide sequence which encoded a 12 amino acid fragment of a membrane associated molecule could be synthesized based on the genetic code. Table 4 below indicates all of the bases which code for an amino acid. Thus, one of skill in the art could deduce a polynucleotide coding sequence based on the amino acid sequences described herein. The coding sequence could then be cloned into an expression vector described elsewhere herein and the resulting polypeptide could be purified, using methods known to one of skill in the art, see for example, the techniques described in “Methods In Enzymology”, 1990, Academic Press, Inc., San Diego, “Protein Purification: Principles and Practice”, 1982, Springer-Verlag, New York, which are incorporated by reference herein in their entirety. The purified polypeptide then could be used to immunize animals in the antibody production method described above. Additionally, the deduced polynucleotide sequences can be use to clone the polynucleotide which encodes the membrane associated molecules described herein.

TABLE 4
The Standard Genetic Code

| | T | C | A | G |
|---|---|---|---|---|
| T | TTT Phe (F) | TCT Ser (S) | TAT Tyr (Y) | TGT Cys (C) |
| | TTC Phe (F) | TCC Ser (S) | TAC Tyr (Y) | TGC |
| | TTA Leu (L) | TCA Ser (S) | TAA Ter | TGA Ter |
| | TTG Leu (L) | TCG Ser (S) | TAG Ter | TGG Trp (W) |
| C | CTT Leu (L) | CCT Pro (P) | CAT His (H) | CGT Arg (R) |
| | CTC Leu (L) | CCC Pro (P) | CAC His (H) | CGC Arg (R) |
| | CTA Leu (L) | CCA Pro (P) | CAA Gln (Q) | CGA Arg (R) |
| | CTG Leu (L) | CCG Pro (P) | CAG Gln (Q) | CGG Arg (R) |
| A | ATT Ile (I) | ACT Thr (T) | AAT Asn (N) | AGT Ser (S) |
| | ATC Ile (I) | ACC Thr (T) | AAC Asn (N) | AGC Ser (S) |
| | ATA Ile (I) | ACA Thr (T) | AAA Lys (K) | AGA Arg (R) |
| | ATG Met (M) | ACG Thr (T) | AAG Lys (K) | AGG Arg (R) |
| G | GTT Val (V) | GCT Ala (A) | GAT Asp (D) | GGT Gly (G) |
| | GTC Val (V) | GCC Ala (A) | GAC Asp (D) | GGC Gly (G) |
| | GTA Val (V) | GCA Ala (A) | GAA Glu (E) | GGA Gly (G) |
| | GTG Val (V) | GCG Ala (A) | GAG Glu (E) | GGG Gly (G) |

[0315] Accordingly, the present invention provides methods of generating monoclonal antibodies as well as antibodies produced by the method comprising culturing a hybridoma cell secreting an antibody of the invention wherein, preferably, the hybridoma is generated by fusing splenocytes isolated from a mouse immunized with an antigen of the invention with myeloma cells and then screening the hybridomas resulting from the fusion for hybridoma clones that secrete an antibody able to bind a desired target polypeptide, e.g., a membrane associated molecule.

[0316] Antibody fragments that recognize specific epitopes may be generated by known techniques. For example, Fab and F(ab′)₂ fragments may be produced by proteolytic cleavage of immunoglobulin molecules, using enzymes such as papain (to produce Fab fragments) or pepsin (to produce F(ab′)₂ fragments). F(ab′)₂ fragments contain the variable region, the light chain constant region and the C_{H}1 domain of the heavy chain.

[0317] Those skilled in the art will also appreciate that DNA encoding antibodies or antibody fragments (e.g., antigen binding sites) may also be derived from antibody phage libraries. In a particular, such phage can be utilized to display antigen-binding domains expressed from a repertoire or combinatorial antibody library (e.g., human or murine). Phage expressing an antigen binding domain that binds the antigen of interest can be selected or identified with antigen, e.g., using labeled antigen or antigen bound or captured to a solid surface or bead. Phage used in these methods are typically filamentous phage including fd and M13 binding domains expressed from phage with Fab, Fv or disulfide stabilized Fv antibody domains recombinantly fused to either the phage gene III or gene VIII protein. Exemplary methods are set forth, for example, in EP 368 684 B1; U.S. Pat. No. 5,969,108, Hoogenboom, H. R. and Chames, Immunol. Today 21:371 (2000); Nagy et al. Nat. Med. 8:801 (2002); Huie et al., Proc. Natl. Acad. Sci. USA 98:2682 (2001); Lui et al., J. Mol. Biol. 315:1063 (2002), each of which is incorporated herein by reference. Several publications (e.g., Marks et al., Bio/Technology 10:779-783 (1992)) have described the production of high affinity human antibodies by chain shuffling, as well as combinatorial infection and in vivo recombination as a strategy for constructing large phage libraries. In another embodiment, Ribosomal display can be used to replace bacteriophage as the display platform (see, e.g., Hanes et al., Nat. Biotechnol. 18:1287 (2000); Wilson et al., Proc. Natl. Acad. Sci. USA 98:3750 (2001); or Irving et al., J. Immunol. Methods 248:31 (2001)). In yet another embodiment, cell surface libraries can be screened for antibodies (Boder et al., Proc. Natl. Acad. Sci. USA 97:10701 (2000); Daugherty et al., J. Immunol. Methods 243:211 (2000)). Such procedures provide alternatives to traditional hybridoma techniques for the isolation and subsequent cloning of monoclonal antibodies.

[0318] In phage display methods, functional antibody domains are displayed on the surface of phage particles which carry the polynucleotide sequences encoding them. In particular, DNA sequences encoding V_{H} and V_{L} regions are amplified from animal cDNA libraries (e.g., human or murine cDNA libraries of lymphoid tissues) or synthetic cDNA libraries. In certain embodiments, the DNA encoding the V_{H} and V_{L} regions are joined together by an scFv linker by PCR and cloned into a phagemid vector (e.g., p CANTAB 6 or pComb 3 HSS). The vector is electroporated in E. coli and the E. coli is infected with helper phage. Phage used in these methods are typically filamentous phage including fd and M13 and the V_{H} or V_{L} regions are usually recombinantly fused to either the phage gene III or gene VIII. Phage expressing an antigen binding domain that binds to an antigen of interest (i.e., a membrane associated molecule or a fragment thereof) can be selected or identified with antigen, e.g., using labeled antigen or antigen bound or captured to a solid surface or bead.

[0319] Additional examples of phage display methods that can be used to make the antibodies include those disclosed in Brinkman et al., J. Immunol. Methods 182:41-50 (1995); Ames et al., J. Immunol. Methods 184:177-186 (1995); Kettleborough et al., Eur. J. Immunol. 24:952-958 (1994); Persic et al., Gene 187:9-18 (1997); Burton et al., Advances in Immunology 57:191-280 (1994); PCT Application No. PCT/GB91/01134; PCT publications WO 90/02809; WO 91/10737; WO 92/01047; WO 92/18619; WO 93/11236; WO 95/15982; WO 95/20401; and U.S. Pat. Nos. 5,698,426; 5,223,409; 5,403,484; 5,580,717; 5,427,908; 5,750,753; 5,821,047; 5,571,698; 5,427,908; 5,516,637; 5,780,225; 5,658,727; 5,733,743 and 5,969,108; each of which is incorporated herein by reference in its entirety.

[0320] As described in the above references, after phage selection, the antibody coding regions from the phage can be isolated and used to generate whole antibodies, including human antibodies, or any other desired antigen binding fragment, and expressed in any desired host, including mammalian cells, insect cells, plant cells, yeast, and bacteria. For example, techniques to recombinantly produce Fab, Fab′ and F(ab′)₂ fragments can also be employed using methods known in the art such as those disclosed in PCT publication WO 92/22324; Mullinax et al., BioTechniques 12(6):864-869 (1992); and Sawai et al., AJRI 34:26-34 (1995); and Better et al., Science 240:1041-1043 (1988) (said references incorporated by reference in their entireties).

[0321] Examples of techniques which can be used to produce single-chain Fvs and antibodies include those described in U.S. Pat. Nos. 4,946,778 and 5,258,498; Huston et al., Methods in Enzymology 203:46-88 (1991); Shu et al., PNAS 90:7995-7999 (1993); and Skerra et al., Science 240:1038-1040 (1988). For some uses, including in vivo use of antibodies in humans and in vitro detection assays, it may be preferable to use chimeric, humanized, or human antibodies. A chimeric antibody is a molecule in which different portions of the antibody are derived from different animal species, such as antibodies having a variable region derived from a murine monoclonal antibody and a human immunoglobulin constant region. Methods for producing chimeric antibodies are known in the art. See, e.g., Morrison, Science 229:1202 (1985); Oi et al., BioTechniques 4:214 (1986); Gillies et al., J. Immunol. Methods 125:191-202 (1989); U.S. Pat. Nos. 5,807,715; 4,816,567; and 4,816,397, which are incorporated herein by reference in their entireties. Humanized antibodies are antibody molecules that bind the desired antigen having one or more complementarity determining regions (CDRs) from a non-human species and framework regions from a human immunoglobulin molecule. Often, framework residues in the human framework regions will be substituted with the corresponding residue from the CDR donor antibody to alter, preferably improve, antigen binding. These framework substitutions are identified by methods well known in the art, e.g., by modeling of the interactions of the CDR and framework residues to identify framework residues important for antigen binding and sequence comparison to identify unusual framework residues at particular positions. (See, e.g., Queen et al., U.S. Pat. No. 5,585,089; Riechmann et al., Nature 332:323 (1988), which are incorporated herein by reference in their entireties.) Antibodies can be humanized using a variety of techniques known in the art including, for example, CDR-grafting (EP 239,400; PCT publication WO 91/09967; U.S. Pat. Nos. 5,225,539; 5,530,101; and 5,585,089), veneering or resurfacing (EP 592,106; EP 519,596; Padlan, Molecular Immunology 28(4/5):489-498 (1991); Studnicka et al., Protein Engineering 7(6):805-814 (1994); Roguska. et al., PNAS 91:969-973 (1994)), and chain shuffling (U.S. Pat. No. 5,565,332).

[0322] Completely human antibodies are particularly desirable for therapeutic treatment of human patients. Human antibodies can be made by a variety of methods known in the art including phage display methods described above using antibody libraries derived from human immunoglobulin sequences. See also, U.S. Pat. Nos. 4,444,887 and 4,716,111; and PCT publications WO 98/46645, WO 98/50433, WO 98/24893, WO 98/16654, WO 96/34096, WO 96/33735, and WO 91/10741; each of which is incorporated herein by reference in its entirety.

[0323] Human antibodies can also be produced using transgenic mice which are incapable of expressing functional endogenous immunoglobulins, but which can express human immunoglobulin genes. For example, the human heavy and light chain immunoglobulin gene complexes may be introduced randomly or by homologous recombination into mouse embryonic stem cells. Alternatively, the human variable region, constant region, and diversity region may be introduced into mouse embryonic stem cells in addition to the human heavy and light chain genes. The mouse heavy and light chain immunoglobulin genes may be rendered non-functional separately or simultaneously with the introduction of human immunoglobulin loci by homologous recombination. In particular, homozygous deletion of the JH region prevents endogenous antibody production. The modified embryonic stem cells are expanded and microinjected into blastocysts to produce chimeric mice. The chimeric mice are then bred to produce homozygous offspring that express human antibodies. The transgenic mice are immunized in the normal fashion with a selected antigen, e.g., all or a portion of a desired target polypeptide. Monoclonal antibodies directed against the antigen can be obtained from the immunized, transgenic mice using conventional hybridoma technology. The human immunoglobulin transgenes harbored by the transgenic mice rearrange during B-cell differentiation, and subsequently undergo class switching and somatic mutation. Thus, using such a technique, it is possible to produce therapeutically useful IgG, IgA, IgM and IgE antibodies. For an overview of this technology for producing human antibodies, see Lonberg and Huszar Int. Rev. Immunol. 13:65-93 (1995). For a detailed discussion of this technology for producing human antibodies and human monoclonal antibodies and protocols for producing such antibodies, see, e.g., PCT publications WO 98/24893; WO 96/34096; WO 96/33735; U.S. Pat. Nos. 5,413,923; 5,625,126; 5,633,425; 5,569,825; 5,661,016; 5,545,806; 5,814,318; and 5,939,598, which are incorporated by reference herein in their entirety. In addition, companies such as Abgenix, Inc. (Freemont, Calif.) and GenPharm (San Jose, Calif.) can be engaged to provide human antibodies directed against a selected antigen using technology similar to that described above.

[0324] Completely human antibodies which recognize a selected epitope can be generated using a technique referred to as “guided selection.” In this approach a selected non-human monoclonal antibody, e.g., a mouse antibody, is used to guide the selection of a completely human antibody recognizing the same epitope. (Jespers et al., Bio/Technology 12:899-903 (1988)). See also, U.S. Pat. No. 5,565,332.

[0325] Further, antibodies to target polypeptides of the invention can, in turn, be utilized to generate anti-idiotype antibodies that “mimic” target polypeptides using techniques well known to those skilled in the art. (See, e.g., Greenspan & Bona, FASEB J. 7(5):437-444 (1989) and Nissinoff, J. Immunol. 147(8):2429-2438 (1991)). For example, antibodies which bind to and competitively inhibit polypeptide multimerization and/or binding of a polypeptide of the invention to a ligand can be used to generate anti-idiotypes that “mimic” the polypeptide multimerization and/or binding domain and, as a consequence, bind to and neutralize polypeptide and/or its ligand. Such neutralizing anti-idiotypes or Fab fragments of such anti-idiotypes can be used in therapeutic regimens to neutralize polypeptide ligand. For example, such anti-idiotypic antibodies can be used to bind a desired target polypeptide and/or to bind its ligands/receptors, and thereby block its biological activity.

[0326] In another embodiment, DNA encoding desired monoclonal antibodies may be readily isolated and sequenced using conventional procedures (e.g., by using oligonucleotide probes that are capable of binding specifically to genes encoding the heavy and light chains of murine antibodies). The isolated and subcloned hybridoma cells serve as a preferred source of such DNA. Once isolated, the DNA may be placed into expression vectors, which are then transfected into prokaryotic or eukaryotic host cells such as E. coli cells, simian COS cells, Chinese Hamster Ovary (CHO) cells or myeloma cells that do not otherwise produce immunoglobulins. More particularly, the isolated DNA (which may be synthetic as described herein) may be used to clone constant and variable region sequences for the manufacture of antibodies as described in Newman et al., U.S. Pat. No. 5,658,570, filed Jan. 25, 1995, which is incorporated by reference herein. Essentially, this entails extraction of RNA from the selected cells, conversion to cDNA, and amplification by PCR using Ig specific primers. Suitable primers for this purpose are also described in U.S. Pat. No. 5,658,570. As will be discussed in more detail below, transformed cells expressing the desired antibody may be grown up in relatively large quantities to provide clinical and commercial supplies of the immunoglobulin.

[0327] In a specific embodiment, the amino acid sequence of the heavy and/or light chain variable domains may be inspected to identify the sequences of the complementarity determining regions (CDRs) by methods that are well know in the art, e.g., by comparison to known amino acid sequences of other heavy and light chain variable regions to determine the regions of sequence hypervariability. Using routine recombinant DNA techniques, one or more of the CDRs may be inserted within framework regions, e.g., into human framework regions to humanize a non-human antibody. The framework regions may be naturally occurring or consensus framework regions, and preferably human framework regions (see, e.g., Chothia et al., J. Mol. Biol. 278:457-479 (1998) for a listing of human framework regions). Preferably, the polynucleotide generated by the combination of the framework regions and CDRs encodes an antibody that specifically binds to at least one epitope of a desired polypeptide, e.g., a membrane associated molecule. Preferably, one or more amino acid substitutions may be made within the framework regions, and, preferably, the amino acid substitutions improve binding of the antibody to its antigen. Additionally, such methods may be used to make amino acid substitutions or deletions of one or more variable region cysteine residues participating in an intrachain disulfide bond to generate antibody molecules lacking one or more intrachain disulfide bonds. Other alterations to the polynucleotide are encompassed by the present invention and within the skill of the art.

[0328] In addition, techniques developed for the production of “chimeric antibodies” (Morrison et al., Proc. Natl. Acad. Sci. 81:851-855 (1984); Neuberger et al., Nature 312:604-608 (1984); Takeda et al., Nature 314:452-454 (1985)) by splicing genes from a mouse antibody molecule of appropriate antigen specificity together with genes from a human antibody molecule of appropriate biological activity can be used. As used herein, a chimeric antibody is a molecule in which different portions are derived from different animal species, such as those having a variable region derived from a murine monoclonal antibody and a human immunoglobulin constant region, e.g., humanized antibodies.

[0329] Alternatively, techniques described for the production of single chain antibodies (U.S. Pat. No. 4,694,778; Bird, Science 242:423-442 (1988); Huston et al., Proc. Natl. Acad. Sci. USA 85:5879-5883 (1988); and Ward et al., Nature 334:544-554 (1989)) can be adapted to produce single chain antibodies. Single chain antibodies are formed by linking the heavy and light chain fragments of the Fv region via an amino acid bridge, resulting in a single chain antibody. Techniques for the assembly of functional Fv fragments in E. coli may also be used (Skerra et al., Science 242:1038-1041 (1988)).

[0330] Yet other embodiments of the present invention comprise the generation of human or substantially human antibodies in transgenic animals (e.g., mice) that are incapable of endogenous immunoglobulin production (see e.g., U.S. Pat. Nos. 6,075,181, 5,939,598, 5,591,669 and 5,589,369 each of which is incorporated herein by reference). For example, it has been described that the homozygous deletion of the antibody heavy-chain joining region in chimeric and germ-line mutant mice results in complete inhibition of endogenous antibody production. Transfer of a human immunoglobulin gene array to such germ line mutant mice will result in the production of human antibodies upon antigen challenge. Another preferred means of generating human antibodies using SCID mice is disclosed in U.S. Pat. No. 5,811,524 which is incorporated herein by reference. It will be appreciated that the genetic material associated with these human antibodies may also be isolated and manipulated as described herein.

[0331] Yet another highly efficient means for generating recombinant antibodies is disclosed by Newman, Biotechnology 10: 1455-1460 (1992). Specifically, this technique results in the generation of primatized antibodies that contain monkey variable domains and human constant sequences. This reference is incorporated by reference in its entirety herein. Moreover, this technique is also described in commonly assigned U.S. Pat. Nos. 5,658,570, 5,693,780 and 5,756,096 each of which is incorporated herein by reference.

[0332] In another embodiment, lymphocytes can be selected by micromanipulation and the variable genes isolated. For example, peripheral blood mononuclear cells can be isolated from an immunized mammal and cultured for about 7 days in vitro. The cultures can be screened for specific IgGs that meet the screening criteria. Cells from positive wells can be isolated. Individual Ig-producing B cells can be isolated by FACS or by identifying them in a complement-mediated hemolytic plaque assay. Ig-producing B cells can be micromanipulated into a tube and the V_{H} and V_{L} genes can be amplified using, e.g., RT-PCR. The V_{H} and V_{L} genes can be cloned into an antibody expression vector and transfected into cells (e.g., eukaryotic or prokaryotic cells) for expression.

[0333] Alternatively, antibody-producing cell lines may be selected and cultured using techniques well known to the skilled artisan. Such techniques are described in a variety of laboratory manuals and primary publications. In this respect, techniques suitable for use in the invention as described below are described in Current Protocols in Immunology, Coligan et al., Eds., Green Publishing Associates and Wiley-Interscience, John Wiley and Sons, New York (1991) which is herein incorporated by reference in its entirety, including supplements.

[0334] Antibodies for use in the diagnostic and therapeutic methods disclosed herein can be produced by any method known in the art for the synthesis of antibodies, in particular, by chemical synthesis or preferably, by recombinant expression techniques as described herein.

[0335] It will further be appreciated that the scope of this invention further encompasses all alleles, variants and mutations of antigen binding DNA sequences.

[0336] As is well known, RNA may be isolated from the original hybridoma cells or from other transformed cells by standard techniques, such as guanidinium isothiocyanate extraction and precipitation followed by centrifugation or chromatography. Where desirable, mRNA may be isolated from total RNA by standard techniques such as chromatography on oligo dT cellulose. Suitable techniques are familiar in the art.

[0337] In one embodiment, cDNAs that encode the light and the heavy chains of the antibody may be made, either simultaneously or separately, using reverse transcriptase and DNA polymerase in accordance with well known methods. PCR may be initiated by consensus constant region primers or by more specific primers based on the published heavy and light chain DNA and amino acid sequences. As discussed above, PCR also may be used to isolate DNA clones encoding the antibody light and heavy chains. In this case the libraries may be screened by consensus primers or larger homologous probes, such as mouse constant region probes.

[0338] DNA, typically plasmid DNA, may be isolated from the cells using techniques known in the art, restriction mapped and sequenced in accordance with standard, well known techniques set forth in detail, e.g., in the foregoing references relating to recombinant DNA techniques. Of course, the DNA may be synthetic according to the present invention at any point during the isolation process or subsequent analysis.

[0339] Recombinant expression of an antibody, or fragment, derivative or analog thereof, e.g., a heavy or light chain of an antibody which binds to a target molecule described herein, e.g., a membrane associated molecule, requires construction of an expression vector containing a polynucleotide that encodes the antibody. Once a polynucleotide encoding an antibody molecule or a heavy or light chain of an antibody, or portion thereof (preferably containing the heavy or light chain variable domain), of the invention has been obtained, the vector for the production of the antibody molecule may be produced by recombinant DNA technology using techniques well known in the art. Thus, methods for preparing a protein by expressing a polynucleotide containing an antibody encoding nucleotide sequence are described herein. Methods which are well known to those skilled in the art can be used to construct expression vectors containing antibody coding sequences and appropriate transcriptional and translational control signals. These methods include, for example, in vitro recombinant DNA techniques, synthetic techniques, and in vivo genetic recombination. The invention, thus, provides replicable vectors comprising a nucleotide sequence encoding an antibody molecule of the invention, or a heavy or light chain thereof, or a heavy or light chain variable domain, operably linked to a promoter. Such vectors may include the nucleotide sequence encoding the constant region of the antibody molecule (see, e.g., PCT Publication WO 86/05807; PCT Publication WO 89/01036; and U.S. Pat. No. 5,122,464) and the variable domain of the antibody may be cloned into such a vector for expression of the entire heavy or light chain.

[0340] The expression vector is transferred to a host cell by conventional techniques and the transfected cells are then cultured by conventional techniques to produce an antibody for use in the methods described herein. Thus, the invention includes host cells containing a polynucleotide encoding an antibody of the invention, or a heavy or light chain thereof, operably linked to a heterologous promoter. In preferred embodiments for the expression of double-chained antibodies, vectors encoding both the heavy and light chains may be co-expressed in the host cell for expression of the entire immunoglobulin molecule, as detailed below.

[0341] A variety of host-expression vector systems may be utilized to express antibody molecules for use in the methods described herein. Such host-expression systems represent vehicles by which the coding sequences of interest may be produced and subsequently purified, but also represent cells which may, when transformed or transfected with the appropriate nucleotide coding sequences, express an antibody molecule of the invention in situ. These include but are not limited to microorganisms such as bacteria (e.g., E. coli, B. subtilis) transformed with recombinant bacteriophage DNA, plasmid DNA or cosmid DNA expression vectors containing antibody coding sequences; yeast (e.g., Saccharomyces, Pichia) transformed with recombinant yeast expression vectors containing antibody coding sequences; insect cell systems infected with recombinant virus expression vectors (e.g., baculovirus) containing antibody coding sequences; plant cell systems infected with recombinant virus expression vectors (e.g., cauliflower mosaic virus, CaMV; tobacco mosaic virus, TMV) or transformed with recombinant plasmid expression vectors (e.g., Ti plasmid) containing antibody coding sequences; or mammalian cell systems (e.g., COS, CHO, BLK, 293, 3T3 cells) harboring recombinant expression constructs containing promoters derived from the genome of mammalian cells (e.g., metallothionein promoter) or from mammalian viruses (e.g., the adenovirus late promoter; the vaccinia virus 7.5K promoter). Preferably, bacterial cells such as Escherichia coli, and more preferably, eukaryotic cells, especially for the expression of whole recombinant antibody molecule, are used for the expression of a recombinant antibody molecule. For example, mammalian cells such as Chinese hamster ovary cells (CHO), in conjunction with a vector such as the major intermediate early gene promoter element from human cytomegalovirus is an effective expression system for antibodies (Foecking et al., Gene 45:101 (1986); Cockett et al., Bio/Technology 8:2 (1990)).

[0342] In bacterial systems, a number of expression vectors may be advantageously selected depending upon the use intended for the antibody molecule being expressed. For example, when a large quantity of such a protein is to be produced, for the generation of pharmaceutical compositions of an antibody molecule, vectors which direct the expression of high levels of fusion protein products that are readily purified may be desirable. Such vectors include, but are not limited, to the E. coli expression vector pUR278 (Ruther et al., EMBO J. 2:1791 (1983)), in which the antibody coding sequence may be ligated individually into the vector in frame with the lacZ coding region so that a fusion protein is produced; pIN vectors (Inouye & Inouye, Nucleic Acids Res. 13:3101-3109 (1985); Van Heeke & Schuster, J. Biol. Chem. 24:5503-5509 (1989)); and the pGEX vectors may also be used to express foreign polypeptides as fusion proteins with glutathione S-transferase (GST). In general, such fusion proteins are soluble and can easily be purified from lysed cells by adsorption and binding to a matrix glutathione-agarose beads followed by elution in the presence of free glutathione. The pGEX vectors are designed to include thrombin or factor Xa protease cleavage sites so that the cloned target gene product can be released from the GST moiety.

[0343] In an insect system, Autographa californica nuclear polyhedrosis virus (AcNPV) is typically used as a vector to express foreign genes. The virus grows in Spodoptera frugiperda cells. The antibody coding sequence may be cloned individually into non-essential regions (for example, the polyhedrin gene) of the virus and placed under control of an AcNPV promoter (for example, the polyhedrin promoter).

[0344] In mammalian host cells, a number of viral-based expression systems may be utilized. In cases where an adenovirus is used as an expression vector, the antibody coding sequence of interest may be ligated to an adenovirus transcription/translation control complex, e.g., the late promoter and tripartite leader sequence. This chimeric gene may then be inserted in the adenovirus genome by in vitro or in vivo recombination. Insertion in a non-essential region of the viral genome (e.g., region E1 or E3) will result in a recombinant virus that is viable and capable of expressing the antibody molecule in infected hosts. (e.g., see Logan & Shenk, Proc. Natl. Acad. Sci. USA 81:355-359 (1984)). Specific initiation signals may also be required for efficient translation of inserted antibody coding sequences. These signals include the ATG initiation codon and adjacent sequences. Furthermore, the initiation codon must be in phase with the reading frame of the desired coding sequence to ensure translation of the entire insert. These exogenous translational control signals and initiation codons can be of a variety of origins, both natural and synthetic. The efficiency of expression may be enhanced by the inclusion of appropriate transcription enhancer elements, transcription terminators, etc. (see Bittner et al., Methods in Enzymol. 153:51-544 (1987)).

[0345] In addition, a host cell strain may be chosen which modulates the expression of the inserted sequences, or modifies and processes the gene product in the specific fashion desired. Such modifications (e.g., glycosylation) and processing (e.g., cleavage) of protein products may be important for the function of the protein. Different host cells have characteristic and specific mechanisms for the post-translational processing and modification of proteins and gene products. Appropriate cell lines or host systems can be chosen to ensure the correct modification and processing of the foreign protein expressed. To this end, eukaryotic host cells which possess the cellular machinery for proper processing of the primary transcript, glycosylation, and phosphorylation of the gene product may be used. Such mammalian host cells include but are not limited to CHO, VERY, BHK, HeLa, COS, MDCK, 293, 3T3, WI38, and in particular, breast cancer cell lines such as, for example, BT483, Hs578T, HTB2, BT20 and T47D, and normal mammary gland cell line such as, for example, CRL7030 and Hs578Bst.

[0346] For long-term, high-yield production of recombinant proteins, stable expression is preferred. For example, cell lines which stably express the antibody molecule may be engineered. Rather than using expression vectors which contain viral origins of replication, host cells can be transformed with DNA controlled by appropriate expression control elements (e.g., promoter, enhancer, sequences, transcription terminators, polyadenylation sites, etc.), and a selectable marker. Following the introduction of the foreign DNA, engineered cells may be allowed to grow for 1-2 days in an enriched media, and then are switched to a selective media. The selectable marker in the recombinant plasmid confers resistance to the selection and allows cells to stably integrate the plasmid into their chromosomes and grow to form foci which in turn can be cloned and expanded into cell lines. This method may advantageously be used to engineer cell lines which stably express the antibody molecule.

[0347] A number of selection systems may be used, including but not limited to the herpes simplex virus thymidine kinase (Wigler et al., Cell 11:223 (1977)), hypoxanthine-guanine phosphoribosyltransferase (Szybalska & Szybalski, Proc. Natl. Acad. Sci. USA 48:202 (1992)), and adenine phosphoribosyltransferase (Lowy et al., Cell 22:817 1980) genes can be employed in tk-, hgprt- or aprt-cells, respectively. Also, antimetabolite resistance can be used as the basis of selection for the following genes: dhfr, which confers resistance to methotrexate (Wigler et al., Natl. Acad. Sci. USA 77:357 (1980); O'Hare et al., Proc. Natl. Acad. Sci. USA 78:1527 (1981)); gpt, which confers resistance to mycophenolic acid (Mulligan & Berg, Proc. Natl. Acad. Sci. USA 78:2072 (1981)); neo, which confers resistance to the aminoglycoside G-418 Clinical Pharmacy 12:488-505; Wu and Wu, Biotherapy 3:87-95 (1991); Tolstoshev, Ann. Rev. Pharmacol. Toxicol. 32:573-596 (1993); Mulligan, Science 260:926-932 (1993); and Morgan and Anderson, Ann. Rev. Biochem. 62:191-217 (1993); TIB TECH 11(5):155-215 (May, 1993); and hygro, which confers resistance to hygromycin (Santerre et al., Gene 30:147 (1984). Methods commonly known in the art of recombinant DNA technology which can be used are described in Ausubel et al. (eds.), Current Protocols in Molecular Biology, John Wiley & Sons, NY (1993); Kriegler, Gene Transfer and Expression, A Laboratory Manual, Stockton Press, NY (1990); and in Chapters 12 and 13, Dracopoli et al. (eds), Current Protocols in Human Genetics, John Wiley & Sons, NY (1994); Colberre-Garapin et al., J. Mol. Biol. 150:1 (1981), which are incorporated by reference herein in their entireties.

[0348] The expression levels of an antibody molecule can be increased by vector amplification (for a review, see Bebbington and Hentschel, The use of vectors based on gene amplification for the expression of cloned genes in mammalian cells in DNA cloning, Academic Press, New York, Vol. 3. (1987)). When a marker in the vector system expressing antibody is amplifiable, increase in the level of inhibitor present in culture of host cell will increase the number of copies of the marker gene. Since the amplified region is associated with the antibody gene, production of the antibody will also increase (Crouse et al., Mol. Cell. Biol. 3:257 (1983)).

[0349] The host cell may be co-transfected with two expression vectors of the invention, the first vector encoding a heavy chain derived polypeptide and the second vector encoding a light chain derived polypeptide. The two vectors may contain identical selectable markers which enable equal expression of heavy and light chain polypeptides. Alternatively, a single vector may be used which encodes both heavy and light chain polypeptides. In such situations, the light chain is advantageously placed before the heavy chain to avoid an excess of toxic free heavy chain (Proudfoot, Nature 322:52 (1986); Kohler, Proc. Natl. Acad. Sci. USA 77:2197 (1980)). The coding sequences for the heavy and light chains may comprise cDNA or genomic DNA.

[0350] Once an antibody molecule of the invention has been recombinantly expressed, it may be purified by any method known in the art for purification of an immunoglobulin molecule, for example, by chromatography (e.g., ion exchange, affinity, particularly by affinity for the specific antigen after Protein A, and sizing column chromatography), centrifugation, differential solubility, or by any other standard technique for the purification of proteins. Alternatively, a preferred method for increasing the affinity of antibodies of the invention is disclosed in US 2002 0123057 A1.

[0351] Alterations to the variable region notwithstanding, those skilled in the art will appreciate that, in preferred embodiments, antibodies to membrane associated molecules of the instant invention may comprise antibodies, or immunoreactive fragments thereof, in which at least a fraction of, or the entire region of, one or more of the constant region domains has been deleted (“domain-deleted antibodies”) or otherwise altered so as to provide desired biochemical characteristics such as increased tumor localization or reduced serum half-life when compared with an antibody of approximately the same immunogenicity comprising a native or unaltered constant region.

[0352] In selected embodiments, the constant region of these antibodies to membrane associated molecules will comprise a human constant region. Modifications to the constant region compatible with the instant invention comprise additions, deletions or substitutions of one or more amino acids in one or more domains. That is, the antibodies to membrane associated molecules disclosed herein may comprise alterations or modifications to one or more of the three heavy chain constant domains (C_{H}1, C_{H}2 or C_{H}3) and/or to the light chain constant domain (C_{L}) (as described in PCT/US02/02373 which is incorporated herein by reference).

[0353] In especially preferred embodiments the modified antibodies will comprise domain deleted constructs or variants wherein the entire C_{H}2 domain has been removed (ΔC_{H}2 constructs). Additionally, alterations to the hinge region of the antibody can also be used in the present invention. Modified hinge region between the heavy chains of antibodies can improve purification, stability and production of the antibodies (described in PCT/US2004/020944 which is incorporated herein by reference). For other embodiments a short connecting peptide may be substituted for the deleted domain to provide flexibility and freedom of movement for the variable region. Those skilled in the art will appreciate that such constructs are particularly preferred due to the regulatory properties of the C_{H}2 domain on the catabolic rate of the antibody.

[0354] In certain embodiments, modified antibodies for use in the methods disclosed herein are minibodies. Minibodies can be made using methods described in the art (see, e.g., U.S. Pat. No. 5,837,821 or WO 94/09817A1).

[0355] In another embodiment, modified antibodies for use in the methods disclosed herein are C_{H}2 domain deleted antibodies which are known in the art. Domain deleted constructs can be derived using a vector (e.g., from Biogen Idec Incorporated) encoding an IgG₁ human constant domain (see, e.g., WO 02/060955A2 and WO02/096948A2). This exemplary vector was engineered to delete the C_{H}2 domain and provide a synthetic vector expressing a domain deleted IgG₁ constant region.

[0356] In one embodiment, a binding molecule, e.g., a binding polypeptide, e.g., a membrane associated molecule-specific antibody or immunospecific fragment thereof for use in the diagnostic and treatment methods disclosed herein comprises an immunoglobulin heavy chain having deletion or substitution of a few or even a single amino acid as long as it permits association between the monomeric subunits. For example, the mutation of a single amino acid in selected areas of the C_{H}2 domain may be enough to substantially reduce Fc binding and thereby increase tumor localization. Similarly, it may be desirable to simply delete that part of one or more constant region domains that control the effector function (e.g. complement binding) to be modulated. Such partial deletions of the constant regions may improve selected characteristics of the antibody (serum half-life) while leaving other desirable functions associated with the subject constant region domain intact. Moreover, as alluded to above, the constant regions of the disclosed antibodies may be synthetic through the mutation or substitution of one or more amino acids that enhances the profile of the resulting construct. In this respect it may be possible to disrupt the activity provided by a conserved binding site (e.g. Fc binding) while substantially maintaining the configuration and immunogenic profile of the modified antibody. Yet other embodiments comprise the addition of one or more amino acids to the constant region to enhance desirable characteristics such as effector function or provide for more cytotoxin or carbohydrate attachment. In such embodiments it may be desirable to insert or replicate specific sequences derived from selected constant region domains.

[0357] The present invention also provides the use of antibodies that comprise, consist essentially of, or consist of, variants (including derivatives) of antibody molecules (e.g., the V_{H} regions and/or V_{L} regions) described herein, which antibodies or fragments thereof immunospecifically bind to a membrane associated molecule, variant polypeptide or fragment thereof. Standard techniques known to those of skill in the art can be used to introduce mutations in the nucleotide sequence encoding a binding molecule, including, but not limited to, site-directed mutagenesis and PCR-mediated mutagenesis which result in amino acid substitutions. Preferably, the variants (including derivatives) encode less than 50 amino acid substitutions, less than 40 amino acid substitutions, less than 30 amino acid substitutions, less than 25 amino acid substitutions, less than 20 amino acid substitutions, less than 15 amino acid substitutions, less than 10 amino acid substitutions, less than 5 amino acid substitutions, less than 4 amino acid substitutions, less than 3 amino acid substitutions, or less than 2 amino acid substitutions relative to the reference V_{H} region, V_{H}CDR1, V_{H}CDR2, V_{H}CDR3, V_{L} region, V_{L}CDR1, V_{L}CDR2, or V_{L}CDR3. A “conservative amino acid substitution” is one in which the amino acid residue is replaced with an amino acid residue having a side chain with a similar charge. Families of amino acid residues having side chains with similar charges have been defined in the art. These families include amino acids with basic side chains (e.g., lysine, arginine, histidine), acidic side chains (e.g., aspartic acid, glutamic acid), uncharged polar side chains (e.g., glycine, asparagine, glutamine, serine, threonine, tyrosine, cysteine), nonpolar side chains (e.g., alanine, valine, leucine, isoleucine, proline, phenylalanine, methionine, tryptophan), beta-branched side chains (e.g., threonine, valine, isoleucine) and aromatic side chains (e.g., tyrosine, phenylalanine, tryptophan, histidine). Alternatively, mutations can be introduced randomly along all or part of the coding sequence, such as by saturation mutagenesis, and the resultant mutants can be screened for biological activity to identify mutants that retain activity (e.g., the ability to bind a membrane associated molecule).

[0358] For example, it is possible to introduce mutations only in framework regions or only in CDR regions of an antibody molecule. Introduced mutations may be silent or neutral missense mutations, i.e., have no, or little, effect on an antibody's ability to bind antigen. These types of mutations may be useful to optimize codon usage, or improve a hybridoma's antibody production. Alternatively, non-neutral missense mutations may alter an antibody's ability to bind antigen. The location of most silent and neutral missense mutations is likely to be in the framework regions, while the location of most non-neutral missense mutations is likely to be in CDR, though this is not an absolute requirement. One of skill in the art would be able to design and test mutant molecules with desired properties such as no alteration in antigen binding activity or alteration in binding activity (e.g., improvements in antigen binding activity or change in antibody specificity). Following mutagenesis, the encoded protein may routinely be expressed and the functional and/or biological activity of the encoded protein, (e.g., ability to immunospecifically bind at least one epitope of a membrane associated molecule) can be determined using techniques described herein or by routinely modifying techniques known in the art.

### Fusion Proteins and Antibody Conjugates

[0359] As discussed in more detail elsewhere herein, binding molecules, e.g., binding polypeptides, e.g., membrane associated molecule-specific antibodies or immunospecific fragments thereof for use in the diagnostic and treatment methods disclosed herein may further be recombinantly fused to a heterologous polypeptide at the N- or C-terminus or chemically conjugated (including covalent and non-covalent conjugations) to polypeptides or other compositions. For example, membrane associated molecule-specific binding molecules may be recombinantly fused or conjugated to molecules useful as labels in detection assays and effector molecules such as heterologous polypeptides, drugs, radionuclides, or toxins. See, e.g., PCT publications WO 92/08495; WO 91/14438; WO 89/12624; U.S. Pat. No. 5,314,995; and EP 396,387.

[0360] Binding molecules, e.g., binding polypeptides, e.g., membrane associated molecule-specific antibodies or immunospecific fragments thereof for use in the diagnostic and treatment methods disclosed herein include derivatives that are modified, i.e., by the covalent attachment of any type of molecule to the antibody such that covalent attachment does not prevent the antibody binding a membrane associated molecule. For example, but not by way of limitation, the antibody derivatives include antibodies that have been modified, e.g., by glycosylation, acetylation, pegylation, phosphylation, phosphorylation, amidation, derivatization by known protecting/blocking groups, proteolytic cleavage, linkage to a cellular ligand or other protein, etc. Any of numerous chemical modifications may be carried out by known techniques, including, but not limited to specific chemical cleavage, acetylation, formylation, metabolic synthesis of tunicamycin, etc. Additionally, the derivative may contain one or more non-classical amino acids.

[0361] Binding molecules, e.g., binding polypeptides, e.g., membrane associated molecule-specific antibodies or immunospecific fragments thereof for use in the diagnostic and treatment methods disclosed herein can be composed of amino acids joined to each other by peptide bonds or modified peptide bonds, i.e., peptide isosteres, and may contain amino acids other than the 20 gene-encoded amino acids. Membrane associated molecule-specific antibodies may be modified by natural processes, such as posttranslational processing, or by chemical modification techniques which are well known in the art. Such modifications are well described in basic texts and in more detailed monographs, as well as in a voluminous research literature. Modifications can occur anywhere in the membrane associated molecule-specific antibody, including the peptide backbone, the amino acid side-chains and the amino or carboxyl termini, or on moieties such as carbohydrates. It will be appreciated that the same type of modification may be present in the same or varying degrees at several sites in a given membrane associated molecule-specific antibody. Also, a given membrane associated molecule-specific antibody may contain many types of modifications. Membrane associated molecule-specific antibodies may be branched, for example, as a result of ubiquitination, and they may be cyclic, with or without branching. Cyclic, branched, and branched cyclic membrane associated molecule-specific antibodies may result from posttranslation natural processes or may be made by synthetic methods. Modifications include acetylation, acylation, ADP-ribosylation, amidation, covalent attachment of flavin, covalent attachment of a heme moiety, covalent attachment of a nucleotide or nucleotide derivative, covalent attachment of a lipid or lipid derivative, covalent attachment of phosphotidylinositol, cross-linking, cyclization, disulfide bond formation, demethylation, formation of covalent cross-links, formation of cysteine, formation of pyroglutamate, formylation, gamma-carboxylation, glycosylation, GPI anchor formation, hydroxylation, iodination, methylation, myristoylation, oxidation, pegylation, proteolytic processing, phosphorylation, prenylation, racemization, selenoylation, sulfation, transfer-RNA mediated addition of amino acids to proteins such as arginylation, and ubiquitination. (See, for instance, Proteins—Structure And Molecular Properties, T. E. Creighton, W. H. Freeman and Company, New York 2nd Ed., (1993); Posttranslational Covalent Modification Of Proteins, B. C. Johnson, Ed., Academic Press, New York, pgs. 1-12 (1983); Seifter et al., Meth Enzymol 182:626-646 (1990); Rattan et al., Ann NY Acad Sci 663:48-62 (1992)).

[0362] The present invention also provides for fusion proteins comprising, consisting essentially of, or consisting of, an antibody (including molecules comprising, consisting essentially of, or consisting of, antibody fragments or variants thereof), that immunospecifically binds to a membrane associated molecule, and a heterologous polypeptide. Preferably, the heterologous polypeptide to which the antibody is fused is useful for function or is useful to target the membrane associated molecule expressing cells, including but not limited to a breast, ovarian, bladder, colon, lung, prostate, and pancreatic cancer cell. In an alternative preferred embodiment, the heterologous polypeptide to which the antibody is fused is useful for T cell, macrophage, and/or monocyte cell function or is useful to target the antibody to a T cell, macrophage, or monocyte. In one embodiment, a fusion protein of the invention comprises, consists essentially of, or consists of, a polypeptide having the amino acid sequence of any one or more of the V_{H} regions of an antibody of the invention or the amino acid sequence of any one or more of the V_{L} regions of an antibody of the invention or fragments or variants thereof, and a heterologous polypeptide sequence. In another embodiment, a fusion protein for use in the diagnostic and treatment methods disclosed herein comprises, consists essentially of, or consists of a polypeptide having the amino acid sequence of any one, two, three, or more of the V_{H} CDRs of an membrane associated molecule-specific antibody, or the amino acid sequence of any one, two, three, or more of the V_{L} CDRs of a membrane associated molecule-specific antibody, or fragments or variants thereof, and a heterologous polypeptide sequence. In one embodiment, the fusion protein comprises, consists essentially of, or consists of a polypeptide having the amino acid sequence of a V_{H} CDR3 of an membrane associated molecule-specific antibody, or fragment or variant thereof, and a heterologous polypeptide sequence, which fusion protein specifically binds to at least one epitope of membrane associated molecule. In another embodiment, a fusion protein comprises, consists essentially of, or consists of a polypeptide having the amino acid sequence of at least one V_{H} region of a membrane associated molecule-specific antibody and the amino acid sequence of at least one V_{L} region of a membrane associated molecule-specific antibody or immunospecific fragments thereof, and a heterologous polypeptide sequence. Preferably, the V_{H} and V_{L} regions of the fusion protein correspond to a single source antibody (or scFv or Fab fragment) which specifically binds at least one epitope of a membrane associated molecule. In yet another embodiment, a fusion protein for use in the diagnostic and treatment methods disclosed herein comprises, consists essentially of, or consists of a polypeptide having the amino acid sequence of any one, two, three or more of the V_{H} CDRs of a membrane associated molecule-specific antibody and the amino acid sequence of any one, two, three or more of the V_{L} CDRs of a membrane associated molecule-specific antibody, or fragments or variants thereof, and a heterologous polypeptide sequence. Preferably, two, three, four, five, six, or more of the V_{H}CDR(s) or V_{L}CDR(s) correspond to single source antibody (or scFv or Fab fragment) of the invention. Nucleic acid molecules encoding these fusion proteins are also encompassed by the invention.

[0363] The invention also pertains to the use of binding molecules which comprise one or more immunoglobulin domains. Fusion proteins for use in the diagnostic and therapeutic methods disclosed herein comprise a binding domain (which comprises at least one binding site) and a dimerization domain (which comprises at least one heavy chain portion). The subject fusion proteins may be bispecific (with one binding site for a first target and a second binding site for a second target) or may be multivalent (with two binding sites for the same target).

[0364] Exemplary fusion proteins reported in the literature include fusions of the T cell receptor (Gascoigne et al., Proc. Natl. Acad. Sci. USA 84:2936-2940 (1987)); CD4 (Capon et al., Nature 337:525-531 (1989); Traunecker et al., Nature 339:68-70 (1989); Zettmeissl et al., DNA Cell Biol. USA 9:347-353 (1990); and Byrn et al., Nature 344:667-670 (1990)); L-selectin (homing receptor) (Watson et al., J. Cell. Biol. 110:2221-2229 (1990); and Watson et al., Nature 349:164-167 (1991)); CD44 (Aruffo et al., Cell 61:1303-1313 (1990)); CD28 and B7 (Linsley et al., J. Exp. Med. 173:721-730 (1991)); CTLA-4 (Lisley et al., J. Exp. Med. 174:561-569 (1991)); CD22 (Stamenkovic et al., Cell 66:1133-1144 (1991)); TNF receptor (Ashkenazi et al., Proc. Natl. Acad. Sci. USA 88:10535-10539 (1991); Lesslauer et al., Eur. J. Immunol. 27:2883-2886 (1991); and Peppel et al., J. Exp. Med. 174:1483-1489 (1991)); and IgE receptor a (Ridgway and Gorman, J. Cell. Biol. Vol. 115, Abstract No. 1448 (1991)).

[0365] In one embodiment a fusion protein combines the binding domain(s) of the ligand or receptor (e.g. the extracellular domain (ECD) of a receptor) with at least one heavy chain domain and a synthetic connecting peptide. In one embodiment, when preparing the fusion proteins of the present invention, nucleic acid encoding the binding domain of the ligand or receptor domain will be fused C-terminally to nucleic acid encoding the N-terminus of an immunoglobulin constant domain sequence. N-terminal fusions are also possible. In one embodiment, a fusion protein includes a C_{H}2 and a C_{H}3 domain. Fusions may also be made to the C-terminus of the Fc portion of a constant domain, or immediately N-terminal to the CHI of the heavy chain or the corresponding region of the light chain.

[0366] In one embodiment, the sequence of the ligand or receptor binding domain is fused to the N-terminus of the Fc domain of an immunoglobulin molecule. It is also possible to fuse the entire heavy chain constant region to the ligand or receptor binding domain sequence. In one embodiment, a sequence beginning in the hinge region just upstream of the papain cleavage site which defines IgG Fc chemically (i.e. residue 216, taking the first residue of heavy chain constant region to be 114 according to the Kabat system), or analogous sites of other immunoglobulins is used in the fusion. The precise site at which the fusion is made is not critical; particular sites are well known and may be selected in order to optimize the biological activity, secretion, or binding characteristics of the molecule. Methods for making fusion proteins are known in the art.

[0367] For bispecific fusion proteins, the fusion proteins can be assembled as multimers, and particularly as heterodimers or heterotetramers. Generally, these assembled immunoglobulin-like proteins will have known unit structures. A basic four chain structural unit is the form in which IgG, IgD, and IgE exist. A four chain unit is repeated in the higher molecular weight immunoglobulins; IgM generally exists as a pentamer of four basic units held together by disulfide bonds. IgA globulin, and occasionally IgG globulin, may also exist in multimeric form in serum. In the case of multimer, each of the four units may be the same or different.

[0368] As discussed elsewhere herein, binding molecules, e.g., binding polypeptides, e.g., membrane associated molecule-specific antibodies or immunospecific fragments thereof for use in the diagnostic and treatment methods disclosed herein may be fused to heterologous polypeptides to increase the in vivo half life of the polypeptides or for use in immunoassays using methods known in the art. In many cases, the Fc part in a fusion protein is beneficial in therapy and diagnosis, and thus can result in, for example, improved pharmacokinetic properties. (EP A 232,262). Alternatively, deleting the Fc part after the fusion protein has been expressed, detected, and purified, would be desired. For example, the Fc portion may hinder therapy and diagnosis if the fusion protein is used as an antigen for immunizations. In drug discovery, for example, human proteins, such as hIL-5 receptor, have been fused with Fc portions for the purpose of high-throughput screening assays to identify antagonists of hIL-5. (See, D. Bennett et al., J. Molecular Recognition 8:52-58 (1995); K. Johanson et al. J. Biol. Chem. 270:9459-9471 (1995).

[0369] Moreover, binding molecules, e.g., binding polypeptides, e.g., membrane associated molecule-specific antibodies or immunospecific fragments thereof for use in the diagnostic and treatment methods disclosed herein can be fused to marker sequences, such as a peptide to facilitate their purification. In preferred embodiments, the marker amino acid sequence is a hexa-histidine peptide, such as the tag provided in a pQE vector (QIAGEN, Inc., 9259 Eton Avenue, Chatsworth, Calif., 91311), among others, many of which are commercially available. As described in Gentz et al., Proc. Natl. Acad. Sci. USA 86:821-824 (1989), for instance, hexa-histidine provides for convenient purification of the fusion protein. Other peptide tags useful for purification include, but are not limited to, the “HA” tag, which corresponds to an epitope derived from the influenza hemagglutinin protein (Wilson et al., Cell 37:767 (1984)) and the “flag” tag.

[0370] Fusion proteins can be prepared using methods that are well known in the art (see, e.g., U.S. Pat. Nos. 5,116,964 and 5,225,538). Ordinarily, the ligand or ligand binding partner is fused C-terminally to the N-terminus of the constant region of the heavy chain (or heavy chain portion) and in place of the variable region. Any transmembrane regions or lipid or phospholipid anchor recognition sequences of ligand binding receptor are preferably inactivated or deleted prior to fusion. DNA encoding the ligand or ligand binding partner is cleaved by a restriction enzyme at or proximal to the 5′ and 3′ ends of the DNA encoding the desired ORF segment. The resultant DNA fragment is then readily inserted into DNA encoding a heavy chain constant region. The precise site at which the fusion is made may be selected empirically to optimize the secretion or binding characteristics of the soluble fusion protein. DNA encoding the fusion protein is then transfected into a host cell for expression.

[0371] Binding molecules for use in the methods of the present invention may be used in non-conjugated form or may be conjugated to at least one of a variety of molecules, e.g., to improve the therapeutic properties of the molecule, to facilitate target detection, or for imaging or therapy of the patient. Binding molecules, e.g., binding polypeptides, e.g., membrane associated molecule-specific antibodies or immunospecific fragments thereof for use in the diagnostic and treatment methods disclosed herein can be labeled or conjugated either before or after purification, when purification is performed.

[0372] In particular, binding molecules, e.g., binding polypeptides, e.g., membrane associated molecule-specific antibodies or immunospecific fragments thereof for use in the diagnostic and treatment methods disclosed herein may be conjugated to cytotoxins (such as radioisotopes, cytotoxic drugs, or toxins) therapeutic agents, cytostatic agents, biological toxins, prodrugs, peptides, proteins, enzymes, viruses, lipids, biological response modifiers, pharmaceutical agents, immunologically active ligands (e.g., lymphokines or other antibodies wherein the resulting molecule binds to both the neoplastic cell and an effector cell such as a T cell), or PEG. In another embodiment, a binding molecule, e.g., a binding polypeptide, e.g., a membrane associated molecule-specific antibody or immunospecific fragment thereof for use in the diagnostic and treatment methods disclosed herein can be conjugated to a molecule that decreases vascularization of tumors. In other embodiments, the disclosed compositions may comprise binding molecules, e.g., binding polypeptides, e.g., membrane associated molecule-specific antibodies or immunospecific fragments thereof coupled to drugs or prodrugs. Still other embodiments of the present invention comprise the use of binding molecules, e.g., binding polypeptides, e.g., membrane associated molecule-specific antibodies or immunospecific fragments thereof conjugated to specific biotoxins or their cytotoxic fragments such as ricin, gelonin, pseudomonas exotoxin or diphtheria toxin. The selection of which conjugated or unconjugated binding molecule to use will depend on the type and stage of cancer, use of adjunct treatment (e.g., chemotherapy or external radiation) and patient condition. It will be appreciated that one skilled in the art could readily make such a selection in view of the teachings herein.

[0373] It will be appreciated that, in previous studies, anti-tumor antibodies labeled with isotopes have been used successfully to destroy cells in solid tumors as well as lymphomas/leukemias in animal models, and in some cases in humans. Exemplary radioisotopes include: ⁹⁰Y, ¹²⁵I, ¹³¹I, ¹²³I, ¹¹¹In, ¹⁰⁵Rh, ¹⁵³Sm, ⁶⁷Cu, ⁶⁷Ga, ¹⁶⁶Ho, ¹⁷⁷Lu, ¹⁸⁶Re and ¹⁸⁸Re. The radionuclides act by producing ionizing radiation which causes multiple strand breaks in nuclear DNA, leading to cell death. The isotopes used to produce therapeutic conjugates typically produce high energy α- or β-particles which have a short path length. Such radionuclides kill cells to which they are in close proximity, for example neoplastic cells to which the conjugate has attached or has entered. They have little or no effect on non-localized cells. Radionuclides are essentially non-immunogenic.

[0374] With respect to the use of radiolabeled conjugates in conjunction with the present invention, binding molecules, e.g., binding polypeptides, e.g., membrane associated molecule-specific antibodies or immunospecific fragments thereof may be directly labeled (such as through iodination) or may be labeled indirectly through the use of a chelating agent. As used herein, the phrases “indirect labeling” and “indirect labeling approach” both mean that a chelating agent is covalently attached to a binding molecule and at least one radionuclide is associated with the chelating agent. Such chelating agents are typically referred to as bifunctional chelating agents as they bind both the polypeptide and the radioisotope. Particularly preferred chelating agents comprise 1-isothiocycmatobenzyl-3-methyldiothelene triaminepentaacetic acid (“MX-DTPA”) and cyclohexyl diethylenetriamine pentaacetic acid (“CHX-DTPA”) derivatives. Other chelating agents comprise P-DOTA and EDTA derivatives. Particularly preferred radionuclides for indirect labeling include ¹¹¹In and ⁹⁰Y.

[0375] As used herein, the phrases “direct labeling” and “direct labeling approach” both mean that a radionuclide is covalently attached directly to a polypeptide (typically via an amino acid residue). More specifically, these linking technologies include random labeling and site-directed labeling. In the latter case, the labeling is directed at specific sites on the polypeptide, such as the N-linked sugar residues present only on the Fc portion of the conjugates. Further, various direct labeling techniques and protocols are compatible with the instant invention. For example, Technetium-99 labeled polypeptides may be prepared by ligand exchange processes, by reducing pertechnate (TcO₄⁻) with stannous ion solution, chelating the reduced technetium onto a Sephadex column and applying the binding polypeptides to this column, or by batch labeling techniques, e.g. by incubating pertechnate, a reducing agent such as SnCl₂, a buffer solution such as a sodium-potassium phthalate-solution, and the antibodies. In any event, preferred radionuclides for directly labeling antibodies are well known in the art and a particularly preferred radionuclide for direct labeling is ¹³¹I covalently attached via tyrosine residues. Binding molecules, e.g., binding polypeptides, e.g., membrane associated molecule-specific antibodies or immunospecific fragments thereof for use in the diagnostic and treatment methods disclosed herein may be derived, for example, with radioactive sodium or potassium iodide and a chemical oxidizing agent, such as sodium hypochlorite, chloramine T or the like, or an enzymatic oxidizing agent, such as lactoperoxidase, glucose oxidase and glucose.

[0376] Patents relating to chelators and chelator conjugates are known in the art. For instance, U.S. Pat. No. 4,831,175 of Gansow is directed to polysubstituted diethylenetriaminepentaacetic acid chelates and protein conjugates containing the same, and methods for their preparation. U.S. Pat. Nos. 5,099,069, 5,246,692, 5,286,850, 5,434,287 and 5,124,471 of Gansow also relate to polysubstituted DTPA chelates. These patents are incorporated herein by reference in their entireties. Other examples of compatible metal chelators are ethylenediaminetetraacetic acid (EDTA), diethylenetriaminepentaacetic acid (DPTA), 1,4,8,11-tetraazatetradecane, 1,4,8,11-tetraazatetradecane-1,4,8,11-tetraacetic acid, 1-oxa-4,7,12,15-tetraazaheptadecane-4,7,12,15-tetraacetic acid, or the like. Cyclohexyl-DTPA or CHX-DTPA is particularly preferred and is exemplified extensively below. Still other compatible chelators, including those yet to be discovered, may easily be discerned by a skilled artisan and are clearly within the scope of the present invention.

[0377] Compatible chelators, including the specific bifunctional chelator used to facilitate chelation U.S. Pat. Nos. 6,682,134, 6,399,061, and 5,843,439, incorporated herein by reference in their entireties, are preferably selected to provide high affinity for trivalent metals, exhibit increased tumor-to-non-tumor ratios and decreased bone uptake as well as greater in vivo retention of radionuclide at target sites, i.e., B-cell lymphoma tumor sites. However, other bifunctional chelators that may or may not possess all of these characteristics are known in the art and may also be beneficial in tumor therapy.

[0378] It will also be appreciated that, in accordance with the teachings herein, binding molecules may be conjugated to different radiolabels for diagnostic and therapeutic purposes. To this end the aforementioned U.S. Pat. Nos. 6,682,134, 6,399,061, and 5,843,439 disclose radiolabeled therapeutic conjugates for diagnostic “imaging” of tumors before administration of therapeutic antibody. “In2B8” conjugate comprises a murine monoclonal antibody, 2B8, specific to human CD20 antigen, that is attached to ¹¹¹In via a bifunctional chelator, i.e., Mx-DTPA (diethylene-triaminepentaacetic acid), which comprises a 1:1 mixture of 1-isothiocyanato-benzyl-3-methyl-DTPA and 1-methyl-3-isothiocyanatobenzyl-DTPA. ¹¹¹In is particularly preferred as a diagnostic radionuclide because between about 1 to about 10 mCi can be safely administered without detectable toxicity; and the imaging data is generally predictive of subsequent ⁹⁰Y-labeled antibody distribution. Most imaging studies utilize 5 mCi ¹¹¹In-labeled antibody, because this dose is both safe and has increased imaging efficiency compared with lower doses, with optimal imaging occurring at three to six days after antibody administration. See, for example, Murray, J. Nuc. Med. 26: 3328 (1985) and Carraguillo et al., J. Nuc. Med. 26: 67 (1985).

[0379] As indicated above, a variety of radionuclides are applicable to the present invention and those skilled in the can readily determine which radionuclide is most appropriate under various circumstances. For example, ¹³¹I is a well known radionuclide used for targeted immunotherapy. However, the clinical usefulness of ¹³¹I can be limited by several factors including: eight-day physical half-life; dehalogenation of iodinated antibody both in the blood and at tumor sites; and emission characteristics (e.g., large gamma component) which can be suboptimal for localized dose deposition in tumor. With the advent of superior chelating agents, the opportunity for attaching metal chelating groups to proteins has increased the opportunities to utilize other radionuclides such as ¹¹¹In and ⁹⁰Y. ⁹⁰Y provides several benefits for utilization in radioimmunotherapeutic applications: the 64 hour half-life of ⁹⁰Y is long enough to allow antibody accumulation by tumor and, unlike e.g., ¹³¹I, ⁹⁰Y is a pure beta emitter of high energy with no accompanying gamma irradiation in its decay, with a range in tissue of 100 to 1,000 cell diameters. Furthermore, the minimal amount of penetrating radiation allows for outpatient administration of ⁹⁰Y-labeled antibodies. Additionally, internalization of labeled antibody is not required for cell killing, and the local emission of ionizing radiation should be lethal for adjacent tumor cells lacking the target molecule.

[0380] Those skilled in the art will appreciate that non-radioactive conjugates may also be assembled using a variety of techniques depending on the selected agent to be conjugated. For example, conjugates with biotin are prepared e.g. by reacting a binding polypeptide with an activated ester of biotin such as the biotin N-hydroxysuccinimide ester. Similarly, conjugates with a fluorescent marker may be prepared in the presence of a coupling agent, e.g. those listed herein, or by reaction with an isothiocyanate, preferably fluorescein-isothiocyanate. Conjugates of the binding molecules, e.g., binding polypeptides, e.g., membrane associated molecule-specific antibodies or immunospecific fragments thereof with cytostatic/cytotoxic substances and metal chelates are prepared in an analogous manner.

[0381] Additional preferred agents for conjugation to binding molecules, e.g., binding polypeptides, e.g., membrane associated molecule-specific antibodies or immunospecific fragments thereof are cytotoxic drugs, particularly those which are used for cancer therapy. As used herein, “a cytotoxin or cytotoxic agent” means any agent that is detrimental to the growth and proliferation of cells and may act to reduce, inhibit or destroy a cell or malignancy. Exemplary cytotoxins include, but are not limited to, radionuclides, biotoxins, enzymatically active toxins, cytostatic or cytotoxic therapeutic agents, prodrugs, immunologically active ligands and biological response modifiers such as cytokines. Any cytotoxin that acts to retard or slow the growth of immunoreactive cells or malignant cells is within the scope of the present invention.

[0382] Exemplary cytotoxins include, in general, cytostatic agents, alkylating agents, antimetabolites, anti-proliferative agents, tubulin binding agents, hormones and hormone antagonists, and the like. Exemplary cytostatics that are compatible with the present invention include alkylating substances, such as mechlorethamine, triethylenephosphoramide, cyclophosphamide, ifosfamide, chlorambucil, busulfan, melphalan or triaziquone, also nitrosourea compounds, such as carmustine, lomustine, or semustine. Other preferred classes of cytotoxic agents include, for example, the maytansinoid family of drugs. Other preferred classes of cytotoxic agents include, for example, the anthracycline family of drugs, the vinca drugs, the mitomycins, the bleomycins, the cytotoxic nucleosides, the pteridine family of drugs, diynenes, and the podophyllotoxins. Particularly useful members of those classes include, for example, adriamycin, caminomycin, daunorubicin (daunomycin), doxorubicin, aminopterin, methotrexate, methopterin, mithramycin, streptonigrin, dichloromethotrexate, mitomycin C, actinomycin-D, porfiromycin, 5-fluorouracil, floxuridine, ftorafur, 6-mercaptopurine, cytarabine, cytosine arabinoside, podophyllotoxin, or podophyllotoxin derivatives such as etoposide or etoposide phosphate, melphalan, vinblastine, vincristine, leurosidine, vindesine, leurosine and the like. Still other cytotoxins that are compatible with the teachings herein include taxol, taxane, cytochalasin B, gramicidin D, ethidium bromide, emetine, tenoposide, colchicin, dihydroxy anthracin dione, mitoxantrone, procaine, tetracaine, lidocaine, propranolol, and puromycin and analogs or homologs thereof. Hormones and hormone antagonists, such as corticosteroids, e.g. prednisone, progestins, e.g. hydroxyprogesterone or medroprogesterone, estrogens, e.g. diethylstilbestrol, antiestrogens, e.g. tamoxifen, androgens, e.g. testosterone, and aromatase inhibitors, e.g. aminogluthetimide are also compatible with the teachings herein. One skilled in the art may make chemical modifications to the desired compound in order to make reactions of that compound more convenient for purposes of preparing conjugates of the invention.

[0383] One example of particularly preferred cytotoxins comprise members or derivatives of the enediyne family of anti-tumor antibiotics, including calicheamicin, esperamicins or dynemicins. These toxins are extremely potent and act by cleaving nuclear DNA, leading to cell death. Unlike protein toxins which can be cleaved in vivo to give many inactive but immunogenic polypeptide fragments, toxins such as calicheamicin, esperamicins and other enediynes are small molecules which are essentially non-immunogenic. These non-peptide toxins are chemically-linked to the dimers or tetramers by techniques which have been previously used to label monoclonal antibodies and other molecules. These linking technologies include site-specific linkage via the N-linked sugar residues present only on the Fc portion of the constructs. Such site-directed linking methods have the advantage of reducing the possible effects of linkage on the binding properties of the constructs.

[0384] As previously alluded to, compatible cytotoxins for preparation of conjugates may comprise a prodrug. As used herein, the term “prodrug” refers to a precursor or derivative form of a pharmaceutically active substance that is less cytotoxic to tumor cells compared to the parent drug and is capable of being enzymatically activated or converted into the more active parent form. Prodrugs compatible with the invention include, but are not limited to, phosphate-containing prodrugs, thiophosphate-containing prodrugs, sulfate containing prodrugs, peptide containing prodrugs, β-lactam-containing prodrugs, optionally substituted phenoxyacetamide-containing prodrugs or optionally substituted phenylacetamide-containing prodrugs, 5-fluorocytosine and other 5-fluorouridine prodrugs that can be converted to the more active cytotoxic free drug. Further examples of cytotoxic drugs that can be derivatized into a prodrug form for use in the present invention comprise those chemotherapeutic agents described above.

[0385] Among other cytotoxins, it will be appreciated that binding molecules, e.g., binding polypeptides, e.g., membrane associated molecule-specific antibodies or immunospecific fragments thereof for use in the diagnostic and treatment methods disclosed herein can also be associated with or conjugated to a biotoxin such as ricin subunit A, abrin, diptheria toxin, botulinum, cyanginosins, saxitoxin, shigatoxin, tetanus, tetrodotoxin, trichothecene, verrucologen or a toxic enzyme. Preferably, such constructs will be made using genetic engineering techniques that allow for direct expression of the antibody-toxin construct. Other biological response modifiers that may be associated with the binding molecules, e.g., binding polypeptides, e.g., membrane associated molecule-specific antibodies or immunospecific fragments thereof disclosed herein comprise cytokines such as lymphokines and interferons. In view of the instant disclosure it is submitted that one skilled in the art could readily form such constructs using conventional techniques.

[0386] Another class of compatible cytotoxins that may be used in association with or conjugated to the disclosed binding molecules, e.g., binding polypeptides, e.g., membrane associated molecule-specific antibodies or immunospecific fragments thereof, are radiosensitizing drugs that may be effectively directed to tumor or immunoreactive cells. Such drugs enhance the sensitivity to ionizing radiation, thereby increasing the efficacy of radiotherapy. An antibody conjugate internalized by the tumor cell would deliver the radiosensitizer nearer the nucleus where radiosensitization would be maximal. The unbound radiosensitizer linked binding molecules of the invention would be cleared quickly from the blood, localizing the remaining radiosensitization agent in the target tumor and providing minimal uptake in normal tissues. After rapid clearance from the blood, adjunct radiotherapy would be administered in one of three ways: 1.) external beam radiation directed specifically to the tumor, 2.) radioactivity directly implanted in the tumor or 3.) systemic radioimmunotherapy with the same targeting antibody. A potentially attractive variation of this approach would be the attachment of a therapeutic radioisotope to the radiosensitized immunoconjugate, thereby providing the convenience of administering to the patient a single drug.

[0387] In certain embodiments, a moiety that enhances the stability or efficacy of a binding molecule, e.g., a binding polypeptide, e.g., a membrane associated molecule-specific antibody or immunospecific fragment thereof can be conjugated. For example, in one embodiment, PEG can be conjugated to the binding molecules of the invention to increase their half-life in vivo. Leong, S. R., et al., Cytokine 16:106 (2001); Adv. in Drug Deliv. Rev. 54:531 (2002); or Weir et al., Biochem. Soc. Transactions 30:512 (2002).

[0388] The present invention further encompasses the use of binding molecules, e.g., binding polypeptides, e.g., membrane associated molecule-specific antibodies or immunospecific fragments conjugated to a diagnostic or therapeutic agent. The binding molecules can be used diagnostically to, for example, monitor the development or progression of a tumor as part of a clinical testing procedure to, e.g., determine the efficacy of a given treatment and/or prevention regimen. Detection can be facilitated by coupling the binding molecule, e.g., binding polypeptide, e.g., membrane associated molecule-specific antibody or immunospecific fragment thereof to a detectable substance. Examples of detectable substances include various enzymes, prosthetic groups, fluorescent materials, luminescent materials, bioluminescent materials, radioactive materials, positron emitting metals using various positron emission tomographies, and nonradioactive paramagnetic metal ions. See, for example, U.S. Pat. No. 4,741,900 for metal ions which can be conjugated to antibodies for use as diagnostics according to the present invention. Examples of suitable enzymes include horseradish peroxidase, alkaline phosphatase, β-galactosidase, or acetylcholinesterase; examples of suitable prosthetic group complexes include streptavidin/biotin and avidin/biotin; examples of suitable fluorescent materials include umbelliferone, fluorescein, fluorescein isothiocyanate, rhodamine, dichlorotriazinylamine fluorescein, dansyl chloride or phycoerythrin; an example of a luminescent material includes luminol; examples of bioluminescent materials include luciferase, luciferin, and aequorin; and examples of suitable radioactive material include ¹²⁵I, ¹³¹I, ¹¹¹In or ⁹⁹Tc.

[0389] A binding molecule, e.g., a binding polypeptide, e.g., a membrane associated molecule-specific antibody or immunospecific fragment thereof also can be detectably labeled by coupling it to a chemiluminescent compound. The presence of the chemiluminescent-tagged binding molecule is then determined by detecting the presence of luminescence that arises during the course of a chemical reaction. Examples of particularly useful chemiluminescent labeling compounds are luminol, isoluminol, theromatic acridinium ester, imidazole, acridinium salt and oxalate ester.

[0390] One of the ways in which a binding molecule, e.g., a binding polypeptide, e.g., a membrane associated molecule-specific antibody or immunospecific fragment thereof can be detectably labeled is by linking the same to an enzyme and using the linked product in an enzyme immunoassay (EIA) (Voller, A., “The Enzyme Linked Immunosorbent Assay (ELISA)” Microbiological Associates Quarterly Publication, Walkersville, Md., Diagnostic Horizons 2:1-7 (1978)); Voller et al., J. Clin. Pathol. 31:507-520 (1978); Butler, J. E., Meth. Enrymol. 73:482-523 (1981); Maggio, E. (ed.), Enzyme Immunoassay, CRC Press, Boca Raton, Fla., (1980); Ishikawa, E. et al., (eds.), Enzyme Immunoassay, Kgaku Shoin, Tokyo (1981). The enzyme, which is bound to the binding molecule will react with an appropriate substrate, preferably a chromogenic substrate, in such a manner as to produce a chemical moiety which can be detected, for example, by spectrophotometric, fluorimetric or by visual means. Enzymes which can be used to detectably label the antibody include, but are not limited to, malate dehydrogenase, staphylococcal nuclease, delta-5-steroid isomerase, yeast alcohol dehydrogenase, alpha-glycerophosphate, dehydrogenase, triose phosphate isomerase, horseradish peroxidase, alkaline phosphatase, asparaginase, glucose oxidase, beta-galactosidase, ribonuclease, urease, catalase, glucose-6-phosphate dehydrogenase, glucoamylase and acetylcholinesterase. Additionally, the detection can be accomplished by colorimetric methods which employ a chromogenic substrate for the enzyme. Detection may also be accomplished by visual comparison of the extent of enzymatic reaction of a substrate in comparison with similarly prepared standards.

[0391] Detection may also be accomplished using any of a variety of other immunoassays. For example, by radioactively labeling the binding molecule, e.g., binding polypeptide, e.g., membrane associated molecule-specific antibody or immunospecific fragment thereof, it is possible to detect cancer antigens through the use of a radioimmunoassay (RIA) (see, for example, Weintraub, B., Principles of Radioimmunoassays, Seventh Training Course on Radioligand Assay Techniques, The Endocrine Society, (March, 1986)), which is incorporated by reference herein). The radioactive isotope can be detected by means including, but not limited to, a gamma counter, a scintillation counter, or autoradiography.

[0392] A binding molecule, e.g., a binding polypeptide, e.g., a membrane associated molecule-specific antibody or immunospecific fragment thereof can also be detectably labeled using fluorescence emitting metals such as 152Eu, or others of the lanthanide series. These metals can be attached to the antibody using such metal chelating groups as diethylenetriaminepentacetic acid (DTPA) or ethylenediaminetetraacetic acid (EDTA).

[0393] Techniques for conjugating various moieties to a binding molecule, e.g., a binding polypeptide, e.g., a membrane associated molecule-specific antibody or immunospecific fragment thereof are well known, see, e.g., Arnon et al., “Monoclonal Antibodies For Immunotargeting Of Drugs In Cancer Therapy”, in Monoclonal Antibodies And Cancer Therapy, Reisfeld et al. (eds.), pp. 243-56 (Alan R. Liss, Inc. (1985); Hellstrom et al., “Antibodies For Drug Delivery”, in Controlled Drug Delivery (2nd Ed.), Robinson et al. (eds.), Marcel Dekker, Inc., pp. 623-53 (1987); Thorpe, “Antibody Carriers Of Cytotoxic Agents In Cancer Therapy: A Review”, in Monoclonal Antibodies '84: Biological And Clinical Applications, Pinchera et al. (eds.), pp. 475-506 (1985); “Analysis, Results, And Future Prospective Of The Therapeutic Use Of Radiolabeled Antibody In Cancer Therapy”, in Monoclonal Antibodies For Cancer Detection And Therapy, Baldwin et al. (eds.), Academic Press pp. 303-16 (1985), and Thorpe et al., “The Preparation And Cytotoxic Properties Of Antibody-Toxin Conjugates”, Immunol. Rev. 62:119-58 (1982).

### Antibody Expression

[0394] Following manipulation of the isolated genetic material to provide binding molecules, e.g., binding polypeptides, e.g., membrane associated molecule-specific antibodies or immunospecific fragments thereof for use in the diagnostic and treatment methods disclosed herein, the polynucleotides encoding the binding molecules are typically inserted in an expression vector for introduction into host cells that may be used to produce the desired quantity of binding molecule.

[0395] The term “vector” or “expression vector” is used herein to mean vectors used in accordance with the present invention as a vehicle for introducing into and expressing a desired gene in a host cell. As known to those skilled in the art, such vectors may easily be selected from the group consisting of plasmids, phages, viruses and retroviruses. In general, vectors compatible with the instant invention will comprise a selection marker, appropriate restriction sites to facilitate cloning of the desired gene and the ability to enter and/or replicate in eukaryotic or prokaryotic cells.

[0396] For the purposes of this invention, numerous expression vector systems may be employed. For example, one class of vector utilizes DNA elements which are derived from animal viruses such as bovine papilloma virus, polyoma virus, adenovirus, vaccinia virus, baculovirus, retroviruses (RSV, MMTV or MOMLV) or SV40 virus. Others involve the use of polycistronic systems with internal ribosome binding sites. Additionally, cells which have integrated the DNA into their chromosomes may be selected by introducing one or more markers which allow selection of transfected host cells. The marker may provide for prototrophy to an auxotrophic host, biocide resistance (e.g., antibiotics) or resistance to heavy metals such as copper. The selectable marker gene can either be directly linked to the DNA sequences to be expressed, or introduced into the same cell by cotransformation. Additional elements may also be needed for optimal synthesis of mRNA. These elements may include signal sequences, splice signals, as well as transcriptional promoters, enhancers, and termination signals.

[0397] In particularly preferred embodiments the cloned variable region genes are inserted into an expression vector along with the heavy and light chain constant region genes (preferably human) synthetic as discussed above. In one embodiment, this is effected using a proprietary expression vector of Biogen Idec Inc., referred to as NEOSPLA (U.S. Pat. No. 6,159,730). This vector contains the cytomegalovirus promoter/enhancer, the mouse beta globin major promoter, the SV40 origin of replication, the bovine growth hormone polyadenylation sequence, neomycin phosphotransferase exon 1 and exon 2, the dihydrofolate reductase gene and leader sequence. This vector has been found to result in very high level expression of antibodies upon incorporation of variable and constant region genes, transfection in CHO cells, followed by selection in G418 containing medium and methotrexate amplification. Of course, any expression vector which is capable of eliciting expression in eukaryotic cells may be used in the present invention. Examples of suitable vectors include, but are not limited to plasmids pcDNA3, pHCMV/Zeo, pCR3.1, pEF1/His, pIND/GS, pRc/HCMV2, pSV40/Zeo2, pTRACER-HCMV, pUB6/V5-His, pVAX1, and pZeoSV2 (available from Invitrogen, San Diego, Calif.), and plasmid pCI (available from Promega, Madison, Wis.). In general, screening large numbers of transformed cells for those which express suitably high levels if immunoglobulin heavy and light chains is routine experimentation which can be carried out, for example, by robotic systems. Vector systems are also taught in U.S. Pat. Nos. 5,736,137 and 5,658,570, each of which is incorporated by reference in its entirety herein. This system provides for high expression levels, e.g., >30 pg/cell/day. Other exemplary vector systems are disclosed e.g., in U.S. Pat. No. 6,413,777.

[0398] In other preferred embodiments the binding molecules, e.g., binding polypeptides, e.g., membrane associated molecule-specific antibodies or immunospecific fragments thereof for use in the diagnostic and treatment methods disclosed herein may be expressed using polycistronic constructs such as those disclosed in United States Patent Application Publication No. 2003-0157641 A1, filed Nov. 18, 2002 and incorporated herein in its entirety. In these novel expression systems, multiple gene products of interest such as heavy and light chains of antibodies may be produced from a single polycistronic construct. These systems advantageously use an internal ribosome entry site (IRES) to provide relatively high levels of binding molecules, e.g., binding polypeptides, e.g., membrane associated molecule-specific antibodies or immunospecific fragments thereof in eukaryotic host cells. Compatible IRES sequences are disclosed in U.S. Pat. No. 6,193,980 which is also incorporated herein. Those skilled in the art will appreciate that such expression systems may be used to effectively produce the full range of binding molecules disclosed in the instant application.

[0399] More generally, once the vector or DNA sequence encoding a monomeric subunit of the binding polypeptide (e.g. a modified antibody) has been prepared, the expression vector may be introduced into an appropriate host cell. Introduction of the plasmid into the host cell can be accomplished by various techniques well known to those of skill in the art. These include, but are not limited to, transfection (including electrophoresis and electroporation), protoplast fusion, calcium phosphate precipitation, cell fusion with enveloped DNA, microinjection, and infection with intact virus. See, Ridgway, A. A. G. “Mammalian Expression Vectors” Vectors, Rodriguez and Denhardt, Eds., Butterworths, Boston, Mass., Chapter 24.2, pp. 470-472 (1988). Typically, plasmid introduction into the host is via electroporation. The host cells harboring the expression construct are grown under conditions appropriate to the production of the light chains and heavy chains, and assayed for heavy and/or light chain protein synthesis. Exemplary assay techniques include enzyme-linked immunosorbent assay (ELISA), radioimmunoassay (RIA), or fluorescence-activated cell sorter analysis (FACS), immunohistochemistry and the like.

[0400] Along those same lines, “host cells” refers to cells which harbor vectors constructed using recombinant DNA techniques and encoding at least one heterologous gene. In descriptions of processes for isolation of antibodies from recombinant hosts, the terms “cell” and “cell culture” are used interchangeably to denote the source of antibody unless it is clearly specified otherwise. In other words, recovery of polypeptide from the “cells” may mean either from spun down whole cells, or from the cell culture containing both the medium and the suspended cells.

[0401] The host cell line used for protein expression is most preferably of mammalian origin; those skilled in the art are credited with ability to preferentially determine particular host cell lines which are best suited for the desired gene product to be expressed therein. Exemplary host cell lines include, but are not limited to, DG44 and DUXB11 (Chinese Hamster Ovary lines, DHFR minus), HELA (human cervical carcinoma), CV1 (monkey kidney line), COS (a derivative of CV1 with SV40 T antigen), R1610 (Chinese hamster fibroblast) BALBC/3T3 (mouse fibroblast), HAK (hamster kidney line), SP2/O (mouse myeloma), P3x63-Ag3.653 (mouse myeloma), BFA-1c1BPT (bovine endothelial cells), RAJI (human lymphocyte) and 293 (human kidney). CHO cells are particularly preferred. Host cell lines are typically available from commercial services, the American Tissue Culture Collection or from published literature.

[0402] In vitro production allows scale-up to give large amounts of the desired polypeptides. Techniques for mammalian cell cultivation under tissue culture conditions are known in the art and include homogeneous suspension culture, e.g. in an airlift reactor or in a continuous stirrer reactor, or immobilized or entrapped cell culture, e.g. in hollow fibers, microcapsules, on agarose microbeads or ceramic cartridges. If necessary and/or desired, the solutions of polypeptides can be purified by the customary chromatography methods, for example gel filtration, ion-exchange chromatography, chromatography over DEAE-cellulose or (immuno-)affinity chromatography, e.g., after preferential biosynthesis of a synthetic hinge region polypeptide or prior to or subsequent to the HIC chromatography step described herein.

[0403] Genes encoding binding molecules, e.g., binding polypeptides, e.g., membrane associated molecule-specific antibodies or immunospecific fragments thereof for use in the diagnostic and treatment methods disclosed herein can also be expressed non-mammalian cells such as bacteria or yeast or plant cells. Bacteria which readily take up nucleic acids include members of the enterobacteriaceae, such as strains of Escherichia coli or Salmonella; Bacillaceae, such as Bacillus subtilis; Pneumococcus; Streptococcus, and Haemophilus influenzae. It will further be appreciated that, when expressed in bacteria, the heterologous polypeptides typically become part of inclusion bodies. The heterologous polypeptides must be isolated, purified and then assembled into functional molecules. Where tetravalent forms of antibodies are desired, the subunits will then self-assemble into tetravalent antibodies (WO02/096948A2).

[0404] In addition to prokaryotes, eukaryotic microbes may also be used. Saccharomyces cerevisiae, or common baker's yeast, is the most commonly used among eukaryotic microorganisms although a number of other strains are commonly available, e.g., Pichia pastoris.

[0405] For expression in Saccharomyces, the plasmid YRp7, for example, (Stinchcomb et al., Nature 282:39 (1979); Kingsman et al., Gene 7:141 (1979); Tschemper et al., Gene 10:157 (1980)) is commonly used. This plasmid already contains the TRP1 gene which provides a selection marker for a mutant strain of yeast lacking the ability to grow in tryptophan, for example ATCC No. 44076 or PEP4-1 (Jones, Genetics 85:12 (1977)). The presence of the trp1 lesion as a characteristic of the yeast host cell genome then provides an effective environment for detecting transformation by growth in the absence of tryptophan.

### Immunoassays

[0406] Binding molecules, e.g., binding polypeptides, e.g., membrane associated molecule-specific antibodies or immunospecific fragments thereof for use in the diagnostic and treatment methods disclosed herein may be assayed for immunospecific binding by any method known in the art. The immunoassays which can be used include but are not limited to competitive and non-competitive assay systems using techniques such as western blots, radioimmunoassays, ELISA (enzyme linked immunosorbent assay), “sandwich” immunoassays, immunoprecipitation assays, precipitin reactions, gel diffusion precipitin reactions, immunodiffusion assays, agglutination assays, complement-fixation assays, immunoradiometric assays, fluorescent immunoassays, protein A immunoassays, to name but a few. Such assays are routine and well known in the art (see, e.g., Ausubel et al., eds, Current Protocols in Molecular Biology, John Wiley & Sons, Inc., New York, Vol. 1 (1994), which is incorporated by reference herein in its entirety). Exemplary immunoassays are described briefly below (but are not intended by way of limitation).

[0407] Immunoprecipitation protocols generally comprise lysing a population of cells in a lysis buffer such as RIPA buffer (1% NP-40 or Triton X-100, 1% sodium deoxycholate, 0.1% SDS, 0.15 M NaCl, 0.01 M sodium phosphate at pH 7.2, 1% Trasylol) supplemented with protein phosphatase and/or protease inhibitors (e.g., EDTA, PMSF, aprotinin, sodium vanadate), adding the antibody of interest to the cell lysate, incubating for a period of time (e.g., 1-4 hours) at 4.degree. C., adding protein A and/or protein G sepharose beads to the cell lysate, incubating for about an hour or more at 4° C., washing the beads in lysis buffer and resuspending the beads in SDS/sample buffer. The ability of the antibody of interest to immunoprecipitate a particular antigen can be assessed by, e.g., western blot analysis. One of skill in the art would be knowledgeable as to the parameters that can be modified to increase the binding of the antibody to an antigen and decrease the background (e.g., pre-clearing the cell lysate with sepharose beads). For further discussion regarding immunoprecipitation protocols see, e.g., Ausubel et al., eds, Current Protocols in Molecular Biology, John Wiley & Sons, Inc., New York, Vol. 1 (1994) at 10.16.1.

[0408] Western blot analysis generally comprises preparing protein samples, electrophoresis of the protein samples in a polyacrylamide gel (e.g., 8%-20% SDS-PAGE depending on the molecular weight of the antigen), transferring the protein sample from the polyacrylamide gel to a membrane such as nitrocellulose, PVDF or nylon, blocking the membrane in blocking solution (e.g., PBS with 3% BSA or non-fat milk), washing the membrane in washing buffer (e.g., PBS-Tween 20), blocking the membrane with primary antibody (the antibody of interest) diluted in blocking buffer, washing the membrane in washing buffer, blocking the membrane with a secondary antibody (which recognizes the primary antibody, e.g., an anti-human antibody) conjugated to an enzymatic substrate (e.g., horseradish peroxidase or alkaline phosphatase) or radioactive molecule (e.g., 32p or 1251) diluted in blocking buffer, washing the membrane in wash buffer, and detecting the presence of the antigen. One of skill in the art would be knowledgeable as to the parameters that can be modified to increase the signal detected and to reduce the background noise. For further discussion regarding western blot protocols see, e.g., Ausubel et al., eds, Current Protocols in Molecular Biology, John Wiley & Sons, Inc., New York Vol. 1 (1994) at 10.8.1.

[0409] ELISAs comprise preparing antigen, coating the well of a 96 well microtiter plate with the antigen, adding the antibody of interest conjugated to a detectable compound such as an enzymatic substrate (e.g., horseradish peroxidase or alkaline phosphatase) to the well and incubating for a period of time, and detecting the presence of the antigen. In ELISAs the antibody of interest does not have to be conjugated to a detectable compound; instead, a second antibody (which recognizes the antibody of interest) conjugated to a detectable compound may be added to the well. Further, instead of coating the well with the antigen, the antibody may be coated to the well. In this case, a second antibody conjugated to a detectable compound may be added following the addition of the antigen of interest to the coated well. One of skill in the art would be knowledgeable as to the parameters that can be modified to increase the signal detected as well as other variations of ELISAs known in the art. For further discussion regarding ELISAs see, e.g., Ausubel et al., eds, Current Protocols in Molecular Biology, John Wiley & Sons, Inc., New York, Vol. 1 (1994) at 11.2.1.

[0410] The binding affinity of an antibody to an antigen and the off-rate of an antibody-antigen interaction can be determined by competitive binding assays. One example of a competitive binding assay is a radioimmunoassay comprising the incubation of labeled antigen (e.g., ³H or ¹²⁵I) with the antibody of interest in the presence of increasing amounts of unlabeled antigen, and the detection of the antibody bound to the labeled antigen. The affinity of the antibody of interest for a particular antigen and the binding off-rates can be determined from the data by scatchard plot analysis. Competition with a second antibody can also be determined using radioimmunoassays. In this case, the antigen is incubated with antibody of interest is conjugated to a labeled compound (e.g., ³H or ¹²⁵I) in the presence of increasing amounts of an unlabeled second antibody.

[0411] Membrane associated molecule-specific binding molecules may, additionally, be employed histologically, as in immunofluorescence, immunoelectron microscopy or non-immunological assays, for in situ detection of cancer antigen gene products or conserved variants or peptide fragments thereof. In situ detection may be accomplished by removing a histological specimen from a patient, and applying thereto a labeled membrane associated molecule-specific antibody or fragment thereof, preferably applied by overlaying the labeled antibody (or fragment) onto a biological sample. Through the use of such a procedure, it is possible to determine not only the presence of colon tumor associated protein, or conserved variants or peptide fragments, but also its distribution in the examined tissue. Using the present invention, those of ordinary skill will readily perceive that any of a wide variety of histological methods (such as staining procedures) can be modified in order to achieve such in situ detection.

[0412] Immunoassays and non-immunoassays for membrane associated molecule or conserved variants or peptide fragments thereof will typically comprise incubating a sample, such as a biological fluid, a tissue extract, freshly harvested cells, or lysates of cells which have been incubated in cell culture, in the presence of a detectably labeled antibody capable of binding to membrane associated molecules or conserved variants or peptide fragments thereof, and detecting the bound antibody by any of a number of techniques well-known in the art.

[0413] The biological sample may be brought in contact with and immobilized onto a solid phase support or carrier such as nitrocellulose, or other solid support which is capable of immobilizing cells, cell particles or soluble proteins. The support may then be washed with suitable buffers followed by treatment with the detectably labeled membrane associated molecule-specific antibody. The solid phase support may then be washed with the buffer a second time to remove unbound antibody. Optionally the antibody is subsequently labeled. The amount of bound label on solid support may then be detected by conventional means.

[0414] By “solid phase support or carrier” is intended any support capable of binding an antigen or an antibody. Well-known supports or carriers include glass, polystyrene, polypropylene, polyethylene, dextran, nylon, amylases, natural and modified celluloses, polyacrylamides, gabbros, and magnetite. The nature of the carrier can be either soluble to some extent or insoluble for the purposes of the present invention. The support material may have virtually any possible structural configuration so long as the coupled molecule is capable of binding to an antigen or antibody. Thus, the support configuration may be spherical, as in a bead, or cylindrical, as in the inside surface of a test tube, or the external surface of a rod. Alternatively, the surface may be flat such as a sheet, test strip, etc. Preferred supports include polystyrene beads. Those skilled in the art will know many other suitable carriers for binding antibody or antigen, or will be able to ascertain the same by use of routine experimentation.

[0415] The binding activity of a given lot of membrane associated molecule-specific antibody may be determined according to well known methods. Those skilled in the art will be able to determine operative and optimal assay conditions for each determination by employing routine experimentation.

[0416] There are a variety of methods available for measuring the affinity of an antibody-antigen interaction, but relatively few for determining rate constants. Most of the methods rely on either labeling antibody or antigen, which inevitably complicates routine measurements and introduces uncertainties in the measured quantities.

[0417] Surface plasmon reasonance (SPR) as performed on BIAcore offers a number of advantages over conventional methods of measuring the affinity of antibody-antigen interactions: (i) no requirement to label either antibody or antigen; (ii) antibodies do not need to be purified in advance, cell culture supernatant can be used directly; (iii) real-time measurements, allowing rapid semi-quantitative comparison of different monoclonal antibody interactions, are enabled and are sufficient for many evaluation purposes; (iv) biospecific surface can be regenerated so that a series of different monoclonal antibodies can easily be compared under identical conditions; (v) analytical procedures are fully automated, and extensive series of measurements can be performed without user intervention. BIAapplications Handbook, version AB (reprinted 1998), BIACORE code No. BR-1001-86; BIAtechnology Handbook, version AB (reprinted 1998), BIACORE code No. BR-1001-84.

[0418] SPR based binding studies require that one member of a binding pair be immobilized on a sensor surface. The binding partner immobilized is referred to as the ligand. The binding partner in solution is referred to as the analyte. In some cases, the ligand is attached indirectly to the surface through binding to another immobilized molecule, which is referred as the capturing molecule. SPR response reflects a change in mass concentration at the detector surface as analytes bind or dissociate.

[0419] Based on SPR, real-time BIAcore measurements monitor interactions directly as they happen. The technique is well suited to determination of kinetic parameters. Comparative affinity ranking is extremely simple to perform, and both kinetic and affinity constants can be derived from the sensorgram data.

[0420] When analyte is injected in a discrete pulse across a ligand surface, the resulting sensorgram can be divided into three essential phases: (i) Association of analyte with ligand during sample injection; (ii) Equilibrium or steady state during sample injection, where the rate of analyte binding is balanced by dissociation from the complex; (iii) Dissociation of analyte from the surface during buffer flow.

[0421] The association and dissociation phases provide information on the kinetics of analyte-ligand interaction (kₐ and k_{d}, the rates of complex formation and dissociation, k_{d}/kₐ=K_{D}). The equilibrium phase provides information on the affinity of the analyte-ligand interaction (K_{D}).

[0422] BIAevaluation software provides comprehensive facilities for curve fitting using both numerical integration and global fitting algorithms. With suitable analysis of the data, separate rate and affinity constants for interaction can be obtained from simple BIAcore investigations. The range of affinities measurable by this technique is very broad ranging from mM to pM.

[0423] Epitope specificity is an important characteristic of a monoclonal antibody. Epitope mapping with BIAcore, in contrast to conventional techniques using radioimmunoassay, ELISA or other surface adsorption methods, does not require labeling or purified antibodies, and allows multi-site specificity tests using a sequence of several monoclonal antibodies. Additionally, large numbers of analyses can be processed automatically.

[0424] Pair-wise binding experiments test the ability of two MAbs to bind simultaneously to the same antigen. MAbs directed against separate epitopes will bind independently, whereas MAbs directed against identical or closely related epitopes will interfere with each other's binding. These binding experiments with BIAcore are straightforward to carry out.

[0425] For example, one can use a capture molecule to bind the first Mab, followed by addition of antigen and second MAb sequentially. The sensorgrams will reveal: 1. how much of the antigen binds to first Mab, 2. to what extent the second MAb binds to the surface-attached antigen, 3. if the second MAb does not bind, whether reversing the order of the pair-wise test alters the results.

[0426] Peptide inhibition is another technique used for epitope mapping. This method can complement pair-wise antibody binding studies, and can relate functional epitopes to structural features when the primary sequence of the antigen is known. Peptides or antigen fragments are tested for inhibition of binding of different MAbs to immobilized antigen. Peptides which interfere with binding of a given MAb are assumed to be structurally related to the epitope defined by that MAb.

### Pharmaceutical Compositions and Administration Methods

[0427] Methods of preparing and administering binding molecules, e.g., binding polypeptides, e.g., membrane associated molecule-specific antibodies or immunospecific fragments thereof to a subject in need thereof are well known to or are readily determined by those skilled in the art. The route of administration of the binding molecule, e.g., binding polypeptide, e.g., membrane associated molecule-specific antibody or immunospecific fragment thereof may be, for example, oral, parenteral, by inhalation or topical. The term parenteral as used herein includes, e.g., intravenous, intraarterial, intraperitoneal, intramuscular, subcutaneous, rectal or vaginal administration. While all these forms of administration are clearly contemplated as being within the scope of the invention, a form for administration would be a solution for injection, in particular for intravenous or intraarterial injection or drip. Usually, a suitable pharmaceutical composition for injection may comprise a buffer (e.g. acetate, phosphate or citrate buffer), a surfactant (e.g. polysorbate), optionally a stabilizer agent (e.g. human albumin), etc. However, in other methods compatible with the teachings herein, binding molecules, e.g., binding polypeptides, e.g., membrane associated molecule-specific antibodies or immunospecific fragments thereof can be delivered directly to the site of the adverse cellular population thereby increasing the exposure of the diseased tissue to the therapeutic agent.

[0428] Preparations for parenteral administration includes sterile aqueous or non-aqueous solutions, suspensions, and emulsions. Examples of non-aqueous solvents are propylene glycol, polyethylene glycol, vegetable oils such as olive oil, and injectable organic esters such as ethyl oleate. Aqueous carriers include water, alcoholic/aqueous solutions, emulsions or suspensions, including saline and buffered media. In the subject invention, pharmaceutically acceptable carriers include, but are not limited to, 0.01-0.1M and preferably 0.05M phosphate buffer or 0.8% saline. Other common parenteral vehicles include sodium phosphate solutions, Ringer's dextrose, dextrose and sodium chloride, lactated Ringer's, or fixed oils. Intravenous vehicles include fluid and nutrient replenishers, electrolyte replenishers, such as those based on Ringer's dextrose, and the like. Preservatives and other additives may also be present such as for example, antimicrobials, antioxidants, chelating agents, and inert gases and the like.

[0429] More particularly, pharmaceutical compositions suitable for injectable use include sterile aqueous solutions (where water soluble) or dispersions and sterile powders for the extemporaneous preparation of sterile injectable solutions or dispersions. In such cases, the composition must be sterile and should be fluid to the extent that easy syringability exists. It should be stable under the conditions of manufacture and storage and will preferably be preserved against the contaminating action of microorganisms, such as bacteria and fungi. The carrier can be a solvent or dispersion medium containing, for example, water, ethanol, polyol (e.g., glycerol, propylene glycol, and liquid polyethylene glycol, and the like), and suitable mixtures thereof. The proper fluidity can be maintained, for example, by the use of a coating such as lecithin, by the maintenance of the required particle size in the case of dispersion and by the use of surfactants. Suitable formulations for use in the therapeutic methods disclosed herein are described in Remington's Pharmaceutical Sciences, Mack Publishing Co., 16th ed. (1980).

[0430] Prevention of the action of microorganisms can be achieved by various antibacterial and antifungal agents, for example, parabens, chlorobutanol, phenol, ascorbic acid, thimerosal and the like. In many cases, it will be preferable to include isotonic agents, for example, sugars, polyalcohols, such as mannitol, sorbitol, or sodium chloride in the composition. Prolonged absorption of the injectable compositions can be brought about by including in the composition an agent which delays absorption, for example, aluminum monostearate and gelatin.

[0431] In any case, sterile injectable solutions can be prepared by incorporating an active compound (e.g., a binding molecule, e.g., a binding polypeptide, e.g., a membrane associated molecule-specific antibody or immunospecific fragment thereof, by itself or in combination with other active agents) in the required amount in an appropriate solvent with one or a combination of ingredients enumerated herein, as required, followed by filtered sterilization. Generally, dispersions are prepared by incorporating the active compound into a sterile vehicle, which contains a basic dispersion medium and the required other ingredients from those enumerated above. In the case of sterile powders for the preparation of sterile injectable solutions, the preferred methods of preparation are vacuum drying and freeze-drying, which yields a powder of an active ingredient plus any additional desired ingredient from a previously sterile-filtered solution thereof. The preparations for injections are processed, filled into containers such as ampules, bags, bottles, syringes or vials, and sealed under aseptic conditions according to methods known in the art. Further, the preparations may be packaged and sold in the form of a kit such as those described in co-pending U.S. Ser. No. 09/259,337 (US-2002-0102208 A1), which is incorporated herein by reference in its entirety. Such articles of manufacture will preferably have labels or package inserts indicating that the associated compositions are useful for treating a subject suffering from, or predisposed to hyperproliferative disorders.

[0432] Effective doses of the compositions of the present invention, for treatment of hyperproliferative disorders as described herein vary depending upon many different factors, including means of administration, target site, physiological state of the patient, whether the patient is human or an animal, other medications administered, and whether treatment is prophylactic or therapeutic. Usually, the patient is a human but non-human mammals including transgenic mammals can also be treated. Treatment dosages may be titrated using routine methods known to those of skill in the art to optimize safety and efficacy.

[0433] For treatment of hyperproliferative disorders with an antibody or other binding molecule, the dosage can range, e.g., from about 0.0001 to 100 mg/kg, and more usually 0.01 to 5 mg/kg (e.g., 0.02 mg/kg, 0.25 mg/kg, 0.5 mg/kg, 0.75 mg/kg, 1 mg/kg, 2 mg/kg, etc.), of the host body weight. For example dosages can be 1 mg/kg body weight or 10 mg/kg body weight or within the range of 1-10 mg/kg, preferably at least 1 mg/kg. Doses intermediate in the above ranges are also intended to be within the scope of the invention. Subjects can be administered such doses daily, on alternative days, weekly or according to any other schedule determined by empirical analysis. An exemplary treatment entails administration in multiple dosages over a prolonged period, for example, of at least six months. Additional exemplary treatment regimes entail administration once per every two weeks or once a month or once every 3 to 6 months. Exemplary dosage schedules include 1-10 mg/kg or 15 mg/kg on consecutive days, 30 mg/kg on alternate days or 60 mg/kg weekly. In some methods, two or more monoclonal antibodies with different binding specificities are administered simultaneously, in which case the dosage of each antibody administered falls within the ranges indicated.

[0434] Binding molecules, e.g., binding polypeptides, e.g., membrane associated molecule-specific antibodies or immunospecific fragments thereof for use in the diagnostic and treatment methods disclosed herein can be administered on multiple occasions. Intervals between single dosages can be weekly, monthly or yearly. Intervals can also be irregular as indicated by measuring blood levels of target polypeptide or target molecule in the patient. In some methods, dosage is adjusted to achieve a plasma polypeptide concentration of 1-1000 μg/ml and in some methods 25-300 μg/ml. Alternatively, binding molecules can be administered as a sustained release formulation, in which case less frequent administration is required. Dosage and frequency vary depending on the half-life of the antibody in the patient. The half-life of a binding molecule can also be prolonged via fusion to a stable polypeptide or moeity, e.g., albumin or PEG. In general, humanized antibodies show the longest half-life, followed by chimeric antibodies and nonhuman antibodies. In one embodiment, the binding molecules of the invention can be administered in unconjugated form, In another embodiment, the binding molecules, e.g., binding polypeptides, e.g., membrane associated molecule-specific antibodies or immunospecific fragments thereof for use in the methods disclosed herein can be administered multiple times in conjugated form. In still another embodiment, the binding molecules of the invention can be administered in unconjugated form, then in conjugated form, or vise versa.

[0435] The dosage and frequency of administration can vary depending on whether the treatment is prophylactic or therapeutic. In prophylactic applications, compositions comprising antibodies or a cocktail thereof are administered to a patient not already in the disease state or in a pre-disease state to enhance the patient's resistance. Such an amount is defined to be a “prophylactic effective dose.” In this use, the precise amounts again depend upon the patient's state of health and general immunity, but generally range from 0.1 to 25 mg per dose, especially 0.5 to 2.5 mg per dose. A relatively low dosage is administered at relatively infrequent intervals over a long period of time. Some patients continue to receive treatment for the rest of their lives.

[0436] In therapeutic applications, a relatively high dosage (e.g., from about 1 to 400 mg/kg of binding molecule, e.g., antibody per dose, with dosages of from 5 to 25 mg being more commonly used for radioimmunoconjugates and higher doses for cytotoxin-drug conjugated molecules) at relatively short intervals is sometimes required until progression of the disease is reduced or terminated, and preferably until the patient shows partial or complete amelioration of symptoms of disease. Thereafter, the patent can be administered a prophylactic regime.

[0437] In one embodiment, a subject can be treated with a nucleic acid molecule encoding a binding molecule, e.g., a binding polypeptide, e.g., a membrane associated molecule-specific antibody or immunospecific fragment thereof (e.g., in a vector). Doses for nucleic acids encoding polypeptides range from about 10 ng to 1 g, 100 ng to 100 mg, 1 μg to 10 mg, or 30-300 μg DNA per patient. Doses for infectious viral vectors vary from 10-100, or more, virions per dose.

[0438] Polynucleotides of the invention may be synthesized by standard methods known in the art, e.g. by use of an automated DNA synthesizer (such as are commercially available from Biosearch, Applied Biosystems, etc.). As examples, phosphorothioate oligonucleotides may be synthesized by the method of Stein et al., Nucl. Acids Res. 16:3209 (1988), methylphosphonate oligonucleotides can be prepared by use of controlled pore glass polymer supports (Sarin et al., Proc. Natl. Acad. Sci. U.S.A. 85:7448-7451 (1988)), etc.

[0439] Therapeutic agents can be administered by parenteral, topical, intravenous, oral, subcutaneous, intraarterial, intracranial, intraperitoneal, intranasal or intramuscular means for prophylactic and/or therapeutic treatment. In some methods, agents are injected directly into a particular tissue where membrane associated molecule-expressing cells have accumulated, for example intracranial injection. Intramuscular injection or intravenous infusion are preferred for administration of antibody. In some methods, particular therapeutic antibodies are injected directly into the cranium. In some methods, antibodies are administered as a sustained release composition or device, such as a Medipad™ device.

[0440] Agents of the invention can optionally be administered in combination with other agents that are effective in treating the disorder or condition in need of treatment (e.g., prophylactic or therapeutic).

[0441] Effective single treatment dosages (i.e., therapeutically effective amounts) of ⁹⁰Y-labeled antibodies range from between about 5 and about 75 mCi, more preferably between about 10 and about 40 mCi. Effective single treatment non-marrow ablative dosages of ¹³¹I-labeled antibodies range from between about 5 and about 70 mCi, more preferably between about 5 and about 40 mCi. Effective single treatment ablative dosages (i.e., may require autologous bone marrow transplantation) of ¹³¹I-labeled antibodies range from between about 30 and about 600 mCi, more preferably between about 50 and less than about 500 mCi. In conjunction with a chimeric antibody, owing to the longer circulating half life vis-à-vis murine antibodies, an effective single treatment non-marrow ablative dosages of iodine-131 labeled chimeric antibodies range from between about 5 and about 40 mCi, more preferably less than about 30 mCi. Imaging criteria for, e.g., the ¹¹¹In label, are typically less than about 5 mCi.

[0442] While a great deal of clinical experience has been gained with ¹³¹I and ⁹⁰Y, other radiolabels are known in the art and have been used for similar purposes. Still other radioisotopes are used for imaging. For example, additional radioisotopes which are compatible with the scope of the instant invention include, but are not limited to, ¹²³I, ¹²⁵I, ³²P, ⁵⁷Co, ⁶⁴Cu, ⁶⁷Cu, ⁷⁷Br, ⁸¹Rb, ⁸¹Kr, ⁸⁷Sr, ¹¹³In, ¹²⁷Cs, ¹²⁹Cs, ¹³²I, ¹⁹⁷Hg, ²⁰³Pb, ²⁰⁶Bi, ¹⁷⁷Lu, ¹⁸⁶Re, ²¹²Pb, ²¹²Bi, 47Sc, ¹⁰⁵Rd, ¹⁰⁹Pd, ¹⁵³Sm, ¹⁸⁸Re, ¹⁹⁹Au, ²²⁵Ac, ²¹¹At, and ²¹³Bi. In this respect alpha, gamma and beta emitters are all compatible with in the instant invention. Further, in view of the instant disclosure it is submitted that one skilled in the art could readily determine which radionuclides are compatible with a selected course of treatment without undue experimentation. To this end, additional radionuclides which have already been used in clinical diagnosis include ¹²⁵I, ¹²³I, ⁹⁹Tc, ⁴³K, ⁵²Fe, ⁶⁷Ga, ⁶⁸Ga, as well as ¹¹¹In. Antibodies have also been labeled with a variety of radionuclides for potential use in targeted immunotherapy (Peirersz et al. Immunol. Cell Biol. 65: 111-125 (1987)). These radionuclides include ¹⁸⁸Re and ¹⁸⁶Re as well as ¹⁹⁹Au and ⁶⁷Cu to a lesser extent. U.S. Pat. No. 5,460,785 provides additional data regarding such radioisotopes and is incorporated herein by reference.

[0443] Whether or not binding molecules, e.g., binding polypeptides, e.g., membrane associated molecule-specific antibodies or immunospecific fragments thereof for use in the diagnostic and treatment methods disclosed herein are used in a conjugated or unconjugated form, it will be appreciated that a major advantage of the present invention is the ability to use these molecules in myelosuppressed patients, especially those who are undergoing, or have undergone, adjunct therapies such as radiotherapy or chemotherapy. That is, the beneficial delivery profile (i.e. relatively short serum dwell time, high binding affinity and enhanced localization) of the molecules makes them particularly useful for treating patients that have reduced red marrow reserves and are sensitive to myelotoxicity. In this regard, the unique delivery profile of the molecules make them very effective for the administration of radiolabeled conjugates to myelosuppressed cancer patients. As such, binding molecules, e.g., binding polypeptides, e.g., membrane associated molecule-specific antibodies or immunospecific fragments thereof for use in the treatment methods disclosed herein are useful in a conjugated or unconjugated form in patients that have previously undergone adjunct therapies such as external beam radiation or chemotherapy. In other preferred embodiments, binding molecules, e.g., binding polypeptides, e.g., membrane associated molecule-specific antibodies or immunospecific fragments thereof (again in a conjugated or unconjugated form) may be used in a combined therapeutic regimen with chemotherapeutic agents. Those skilled in the art will appreciate that such therapeutic regimens may comprise the sequential, simultaneous, concurrent or coextensive administration of the disclosed antibodies or other binding molecules and one or more chemotherapeutic agents. Particularly preferred embodiments of this aspect of the invention will comprise the administration of a radiolabeled binding polypeptide.

[0444] While binding molecules, e.g., binding polypeptides, e.g., membrane associated molecule-specific antibodies or immunospecific fragments thereof may be administered as described immediately above, it must be emphasized that in other embodiments conjugated and unconjugated binding molecules may be administered to otherwise healthy patients as a first line therapeutic agent. In such embodiments binding molecules may be administered to patients having normal or average red marrow reserves and/or to patients that have not, and are not, undergoing adjunct therapies such as external beam radiation or chemotherapy.

[0445] However, as discussed above, selected embodiments of the invention comprise the administration of binding molecules, e.g., binding polypeptides, e.g., membrane associated molecule-specific antibodies or immunospecific fragments thereof to myelosuppressed patients or in combination or conjunction with one or more adjunct therapies such as radiotherapy or chemotherapy (i.e. a combined therapeutic regimen). As used herein, the administration of binding molecules, e.g., binding polypeptides, e.g., membrane associated molecule-specific antibodies or immunospecific fragments thereof in conjunction or combination with an adjunct therapy means the sequential, simultaneous, coextensive, concurrent, concomitant or contemporaneous administration or application of the therapy and the disclosed binding molecules. Those skilled in the art will appreciate that the administration or application of the various components of the combined therapeutic regimen may be timed to enhance the overall effectiveness of the treatment. For example, chemotherapeutic agents could be administered in standard, well known courses of treatment followed within a few weeks by radioimmunoconjugates described herein. Conversely, cytotoxin-conjugated binding molecules could be administered intravenously followed by tumor localized external beam radiation. In yet other embodiments, binding molecules may be administered concurrently with one or more selected chemotherapeutic agents in a single office visit. A skilled artisan (e.g. an experienced oncologist) would be readily be able to discern effective combined therapeutic regimens without undue experimentation based on the selected adjunct therapy and the teachings of the instant specification.

[0446] In this regard it will be appreciated that the combination of a binding molecule (with or without cytotoxin) and the chemotherapeutic agent may be administered in any order and within any time frame that provides a therapeutic benefit to the patient. That is, the chemotherapeutic agent and binding molecule, e.g., binding polypeptide, e.g., membrane associated molecule-specific antibody or immunospecific fragment thereof, may be administered in any order or concurrently. In selected embodiments binding molecules, e.g., binding polypeptides, e.g., membrane associated molecule-specific antibodies or immunospecific fragments thereof for use in treatment methods disclosed herein will be administered to patients that have previously undergone chemotherapy. In yet other embodiments, binding molecules, e.g., binding polypeptides, e.g., membrane associated molecule-specific antibodies or immunospecific fragments thereof for use in treatment methods disclosed herein will be administered substantially simultaneously or concurrently with the chemotherapeutic treatment. For example, the patient may be given the binding molecule while undergoing a course of chemotherapy. In preferred embodiments the binding molecule will be administered within 1 year of any chemotherapeutic agent or treatment. In other preferred embodiments the polypeptide will be administered within 10, 8, 6, 4, or 2 months of any chemotherapeutic agent or treatment. In still other preferred embodiments the binding molecule will be administered within 4, 3, 2 or 1 week of any chemotherapeutic agent or treatment. In yet other embodiments the binding molecule will be administered within 5, 4, 3, 2 or 1 days of the selected chemotherapeutic agent or treatment. It will further be appreciated that the two agents or treatments may be administered to the patient within a matter of hours or minutes (i.e. substantially simultaneously).

[0447] Moreover, in accordance with the present invention a myelosuppressed patient shall be held to mean any patient exhibiting lowered blood counts. Those skilled in the art will appreciate that there are several blood count parameters conventionally used as clinical indicators of myelosuppresion and one can easily measure the extent to which myelosuppresion is occurring in a patient. Examples of art accepted myelosuppression measurements are the Absolute Neutrophil Count (ANC) or platelet count. Such myelosuppression or partial myeloablation may be a result of various biochemical disorders or diseases or, more likely, as the result of prior chemotherapy or radiotherapy. In this respect, those skilled in the art will appreciate that patients who have undergone traditional chemotherapy typically exhibit reduced red marrow reserves. As discussed above, such subjects often cannot be treated using optimal levels of cytotoxin (i.e. radionuclides) due to unacceptable side effects such as anemia or immunosuppression that result in increased mortality or morbidity.

[0448] More specifically conjugated or unconjugated binding molecules, e.g., binding polypeptides, e.g., membrane associated molecule-specific antibodies or immunospecific fragments thereof for use in treatment methods disclosed herein may be used to effectively treat patients having ANCs lower than about 2000/mm³ or platelet counts lower than about 150,000/mm³. More preferably binding molecules, e.g., binding polypeptides, e.g., membrane associated molecule-specific antibodies or immunospecific fragments thereof for use in treatment methods disclosed herein may be used to treat patients having ANCs of less than about 1500/mm³, less than about 1000/mm³ or even more preferably less than about 500/mm³. Similarly, binding molecules, e.g., binding polypeptides, e.g., membrane associated molecule-specific antibodies or immunospecific fragments thereof for use in treatment methods disclosed herein may be used to treat patients having a platelet count of less than about 75,000/mm³, less than about 50,000/mm³ or even less than about 10,000/mm³. In a more general sense, those skilled in the art will easily be able to determine when a patient is myelosuppressed using government implemented guidelines and procedures.

[0449] As indicated above, many myelosuppressed patients have undergone courses of treatment including chemotherapy, implant radiotherapy or external beam radiotherapy. In the case of the latter, an external radiation source is for local irradiation of a malignancy. For radiotherapy implantation methods, radioactive reagents are surgically located within the malignancy, thereby selectively irradiating the site of the disease. In any event, the disclosed binding molecules, e.g., binding polypeptides, e.g., membrane associated molecule-specific antibodies or immunospecific fragments thereof for use in treatment methods disclosed herein may be used to treat disorders in patients exhibiting myelosuppression regardless of the cause.

[0450] In this regard it will further be appreciated that binding molecules, e.g., binding polypeptides, e.g., membrane associated molecule-specific antibodies or immunospecific fragments thereof for use in treatment methods disclosed herein may be used in conjunction or combination with any chemotherapeutic agent or agents (e.g. to provide a combined therapeutic regimen) that eliminates, reduces, inhibits or controls the growth of neoplastic cells in vivo. As discussed, such agents often result in the reduction of red marrow reserves. This reduction may be offset, in whole or in part, by the diminished myelotoxicity of the compounds of the present invention that advantageously allow for the aggressive treatment of neoplasias in such patients. In other embodiments, radiolabeled immunoconjugates disclosed herein may be effectively used with radiosensitizers that increase the susceptibility of the neoplastic cells to radionuclides. For example, radiosensitizing compounds may be administered after the radiolabeled binding molecule has been largely cleared from the bloodstream but still remains at therapeutically effective levels at the site of the tumor or tumors.

[0451] With respect to these aspects of the invention, exemplary chemotherapeutic agents that are compatible with the instant invention include alkylating agents, vinca alkaloids (e.g., vincristine and vinblastine), procarbazine, methotrexate and prednisone. The four-drug combination MOPP (mechlethamine (nitrogen mustard), vincristine (Oncovin), procarbazine and prednisone) is very effective in treating various types of lymphoma and comprises a preferred embodiment of the present invention. In MOPP-resistant patients, ABVD (e.g., adriamycin, bleomycin, vinblastine and dacarbazine), ChlVPP (chlorambucil, vinblastine, procarbazine and prednisone), CABS (lomustine, doxorubicin, bleomycin and streptozotocin), MOPP plus ABVD, MOPP plus ABV (doxorubicin, bleomycin and vinblastine) or BCVPP (carmustine, cyclophosphamide, vinblastine, procarbazine and prednisone) combinations can be used. Arnold S. Freedman and Lee M. Nadler, Malignant Lymphomas, in Harrison's Principles of Internal Medicine 1774-1788 (Kurt J. Isselbacher et al., eds., 13^{th} ed. 1994) and V. T. DeVita et al., (1997) and the references cited therein for standard dosing and scheduling. These therapies can be used unchanged, or altered as needed for a particular patient, in combination with one or more binding molecules, e.g., binding polypeptides, e.g., membrane associated molecule-specific antibodies or immunospecific fragments thereof as described herein.

[0452] Additional regimens that are useful in the context of the present invention include use of single alkylating agents such as cyclophosphamide or chlorambucil, or combinations such as CVP (cyclophosphamide, vincristine and prednisone), CHOP (CVP and doxorubicin), C-MOPP (cyclophosphamide, vincristine, prednisone and procarbazine), CAP-BOP (CHOP plus procarbazine and bleomycin), m-BACOD (CHOP plus methotrexate, bleomycin and leucovorin), ProMACE-MOPP (prednisone, methotrexate, doxorubicin, cyclophosphamide, etoposide and leucovorin plus standard MOPP), ProMACE-CytaBOM (prednisone, doxorubicin, cyclophosphamide, etoposide, cytarabine, bleomycin, vincristine, methotrexate and leucovorin) and MACOP-B (methotrexate, doxorubicin, cyclophosphamide, vincristine, fixed dose prednisone, bleomycin and leucovorin). Those skilled in the art will readily be able to determine standard dosages and scheduling for each of these regimens. CHOP has also been combined with bleomycin, methotrexate, procarbazine, nitrogen mustard, cytosine arabinoside and etoposide. Other compatible chemotherapeutic agents include, but are not limited to, 2-chlorodeoxyadenosine (2-CDA), 2′-deoxycoformycin and fludarabine.

[0453] For patients with intermediate- and high-grade malignancies, who fail to achieve remission or relapse, salvage therapy is used. Salvage therapies employ drugs such as cytosine arabinoside, cisplatin, etoposide and ifosfamide given alone or in combination. In relapsed or aggressive forms of certain neoplastic disorders the following protocols are often used: IMVP-16 (ifosfamide, methotrexate and etoposide), MIME (methyl-gag, ifosfamide, methotrexate and etoposide), DHAP (dexamethasone, high dose cytarabine and cisplatin), ESHAP (etoposide, methylpredisolone, HD cytarabine, cisplatin), CEPP(B) (cyclophosphamide, etoposide, procarbazine, prednisone and bleomycin) and CAMP (lomustine, mitoxantrone, cytarabine and prednisone) each with well known dosing rates and schedules.

[0454] The amount of chemotherapeutic agent to be used in combination with the binding molecules disclosed herein may vary by subject or may be administered according to what is known in the art. See for example, Bruce A Chabner et al., Antineoplastic Agents, in Goodman & Gilman's The Pharmacological Basis of Therapeutics 1233-1287 ((Joel G. Hardman et al., eds., 9^{th} ed. (1996).

[0455] As previously discussed, binding molecules, e.g., binding polypeptides, e.g., membrane associated molecule-specific antibodies or immunospecific fragments thereof, or recombinants thereof may be administered in a pharmaceutically effective amount for the in vivo treatment of mammalian hyperproliferative disorders. In this regard, it will be appreciated that the disclosed antibodies will be formulated so as to facilitate administration and promote stability of the active agent. Preferably, pharmaceutical compositions in accordance with the present invention comprise a pharmaceutically acceptable, non-toxic, sterile carrier such as physiological saline, non-toxic buffers, preservatives and the like. For the purposes of the instant application, a pharmaceutically effective amount of binding molecule, e.g., binding polypeptide, e.g., membrane associated molecule-specific antibody or immunospecific fragment thereof, or recombinant thereof, conjugated or unconjugated to a therapeutic agent, shall be held to mean an amount sufficient to achieve effective binding to a target and to achieve a benefit, e.g., to ameliorate symptoms of a disease or disorder or to detect a substance or a cell. In the case of tumor cells, the binding molecule will be preferably be capable of interacting with selected immunoreactive antigens on neoplastic or immunoreactive cells, or on non neoplastic cells, e.g., vascular cells associated with neoplastic cells. and provide for an increase in the death of those cells. Of course, the pharmaceutical compositions of the present invention may be administered in single or multiple doses to provide for a pharmaceutically effective amount of the binding molecule.

[0456] In keeping with the scope of the present disclosure, binding molecules, e.g., binding polypeptides, e.g., membrane associated molecule-specific antibodies or immunospecific fragments thereof for use in treatment methods disclosed herein may be administered to a human or other animal in accordance with the aforementioned methods of treatment in an amount sufficient to produce a therapeutic or prophylactic effect. The binding molecules, e.g., binding polypeptides, e.g., membrane associated molecule-specific antibodies or immunospecific fragments thereof for use in treatment methods disclosed herein can be administered to such human or other animal in a conventional dosage form prepared by combining the antibody of the invention with a conventional pharmaceutically acceptable carrier or diluent according to known techniques. It will be recognized by one of skill in the art that the form and character of the pharmaceutically acceptable carrier or diluent is dictated by the amount of active ingredient with which it is to be combined, the route of administration and other well-known variables. Those skilled in the art will further appreciate that a cocktail comprising one or more species of binding molecules according to the present invention may prove to be particularly effective.

[0457] The practice of the present invention will employ, unless otherwise indicated, conventional techniques of cell biology, cell culture, molecular biology, transgenic biology, microbiology, recombinant DNA, and immunology, which are within the skill of the art. Such techniques are explained fully in the literature. See, for example, Molecular Cloning A Laboratory Manual, 2nd Ed., Sambrook et al., ed., Cold Spring Harbor Laboratory Press: (1989); Molecular Cloning: A Laboratory Manual, Sambrook et al., ed., Cold Springs Harbor Laboratory, New York (1992), DNA Cloning, D. N. Glover ed., Volumes I and II (1985); Oligonucleotide Synthesis, M. J. Gait ed., (1984); Mullis et al. U.S. Pat. No. 4,683,195; Nucleic Acid Hybridization, B. D. Hames & S. J. Higgins eds. (1984); Transcription And Translation, B. D. Hames & S. J. Higgins eds. (1984); Culture Of Animal Cells, R. I. Freshney, Alan R. Liss, Inc., (1987); Immobilized Cells And Enzymes, IRL Press, (1986); B. Perbal, A Practical Guide To Molecular Cloning (1984); the treatise, Methods In Enzymology, Academic Press, Inc., N.Y.; Gene Transfer Vectors For Mammalian Cells, J. H. Miller and M. P. Calos eds., Cold Spring Harbor Laboratory (1987); Methods In Enzymology, Vols. 154 and 155 (Wu et al. eds.); Immunochemical Methods In Cell And Molecular Biology, Mayer and Walker, eds., Academic Press, London (1987); Handbook Of Experimental Immunology, Volumes I-IV, D. M. Weir and C. C. Blackwell, eds., (1986); Manipulating the Mouse Embryo, Cold Spring Harbor Laboratory Press, Cold Spring Harbor, N.Y., (1986); and in Ausubel et al., Current Protocols in Molecular Biology, John Wiley and Sons, Baltimore, Md. (1989).

[0458] General principles of antibody engineering are set forth in Antibody Engineering, 2nd edition, C. A. K. Borrebaeck, Ed., Oxford Univ. Press (1995). General principles of protein engineering are set forth in Protein Engineering, A Practical Approach, Rickwood, D., et al., Eds., IRL Press at Oxford Univ. Press, Oxford, Eng. (1995). General principles of antibodies and antibody-hapten binding are set forth in: Nisonoff, A., Molecular Immunology, 2nd ed., Sinauer Associates, Sunderland, Mass. (1984); and Steward, M. W., Antibodies, Their Structure and Function, Chapman and Hall, New York, N.Y. (1984). Additionally, standard methods in immunology known in the art and not specifically described are generally followed as in Current Protocols in Immunology, John Wiley & Sons, New York; Stites et al. (eds), Basic and Clinical-Immunology (8th ed.), Appleton & Lange, Norwalk, Conn. (1994) and Mishell and Shiigi (eds), Selected Methods in Cellular Immunology, W.H. Freeman and Co., New York (1980).

[0459] Standard reference works setting forth general principles of immunology include Current Protocols in Immunology, John Wiley & Sons, New York; Klein, J., Immunology: The Science of Self-Nonself Discrimination, John Wiley & Sons, New York (1982); Kennett, R., et al., eds., Monoclonal Antibodies, Hybridoma: A New Dimension in Biological Analyses, Plenum Press, New York (1980); Campbell, A., “Monoclonal Antibody Technology” in Burden, R., et al., eds., Laboratory Techniques in Biochemistry and Molecular Biology, Vol. 13, Elsevere, Amsterdam (1984).

[0460] To create the arrays of the invention, single-stranded nucleic acid molecules, e.g., polynucleotide probes, can be spotted onto a substrate in a two-dimensional matrix or array. Each single-stranded polynucleotide probe can comprise at least 5, 10, 15, 20, 25, 30, 35, 40, or 50 or more contiguous nucleotides. In one embodiment, the polynucleotide probes can be selected from the nucleotide sequences shown in Table 6 (for example, SEQ ID NOs:2,385-3,438).

[0461] The invention also includes an array comprising a marker of the present invention e.g., some or all of the sets of molecules set forth in Tables 7-10, complements or fragments thereof. The array can be used to assay expression of one or more genes in the array. In one embodiment, the array can be used to assay gene expression in a tissue to ascertain tissue specificity of genes in the array. This allows a profile to be developed showing a battery of genes specifically expressed in one or more tissues, e.g., cancerous tissues.

[0462] In addition to such qualitative determination, the invention allows the quantitation of gene expression. Thus, not only tissue specificity, but also the level of expression of a battery of genes in the tissue is ascertainable. Thus, genes can be grouped on the basis of their tissue expression per se and level of expression in that tissue. This is useful, for example, in ascertaining the relationship of gene expression between or among tissues. Thus, one tissue can be perturbed and the effect on gene expression in a second tissue can be determined. In this context, the effect of one cell type on another cell type in response to a biological stimulus can be determined. Such a determination is useful, for example, to know the effect of cell-cell interaction at the level of gene expression. If an agent is administered therapeutically to treat one cell type but has an undesirable effect on another cell type, the invention provides an assay to determine the molecular basis of the undesirable effect and thus provides the opportunity to co-administer a counteracting agent or otherwise treat the undesired effect. Similarly, even within a single cell type, undesirable biological effects can be determined at the molecular level. Thus, the effects of an agent on expression of other than the target gene can be ascertained and counteracted.

[0463] In another embodiment, the array can be used to monitor the time course of expression of one or more genes in the array. This can occur in various biological contexts, as disclosed herein, for example development of a hyperproliferative disease or disorder, progression of a hyperproliferative disease or disorder, and processes, such a cellular transformation, e.g., cellular proliferation, associated with a hyperproliferative disease or disorder. The array is also useful for ascertaining the effect of the expression of a gene on the expression of other genes in the same cell or in different cells. This provides, for example, for a selection of alternate molecular targets for therapeutic intervention if the ultimate or downstream target cannot be regulated.

[0464] The array is also useful for ascertaining differential expression patterns of one or more genes in normal and abnormal cells, e.g., cancerous cells. This provides a battery of genes that could serve as a molecular target for diagnosis or therapeutic intervention.

### Preparation of Arrays

[0465] Arrays are known in the art and consist of a surface to which probes that correspond in sequence to gene products (e.g., cDNAs, mRNAs, cRNAs, polypeptides, and fragments thereof), can be specifically hybridized or bound at a known position. In one embodiment, the array is a matrix in which each position represents a discrete binding site for a product encoded by a gene (e.g., a protein or RNA), and in which binding sites are present for products of most or almost all of the genes in the organism's genome. In one embodiment, the “binding site” (hereinafter, “site”) is a nucleic acid or nucleic acid analogue to which a particular cognate cDNA can specifically hybridize. The nucleic acid or analogue of the binding site can be, e.g., a synthetic oligomer, a full-length cDNA, a less-than full length cDNA, or a gene fragment.

### Preparing Nucleic Acid Molecules for Arrays

[0466] As noted above, the “binding site” to which a particular cognate cDNA specifically hybridizes is usually a nucleic acid or nucleic acid analogue attached at that binding site. These DNAs can be obtained by, e.g., polymerase chain reaction (PCR) amplification of gene segments from genomic DNA, cDNA (e.g., by RT-PCR), or cloned sequences. PCR primers are chosen, based on the known sequence of the genes or cDNA, that result in amplification of unique fragments (i.e., fragments that do not share more than 10 bases of contiguous identical sequence with any other fragment on the array). Computer programs are useful in the design of primers with the required specificity and optimal amplification properties. See, e.g., Oligo version 5.0 (National Biosciences™). In the case of binding sites corresponding to very long genes, it will sometimes be desirable to amplify segments near the 3′ end of the gene so that when oligo-dT primed cDNA probes are hybridized to the array, less-than-full length probes will bind efficiently. Typically each gene fragment on the array will be between about 50 bp and about 2000 bp, more typically between about 100 bp and about 1000 bp, and usually between about 300 bp and about 800 bp in length. PCR methods are well known and are described, for example, in Innis et al. eds., 1990, PCR Protocols: A Guide to Methods and Applications, Academic Press Inc. San Diego, Calif., which is incorporated by reference in its entirety. It will be apparent that computer controlled robotic systems are useful for isolating and amplifying nucleic acids.

[0467] An alternative means for generating the nucleic acid molecules for the array is by synthesis of synthetic polynucleotides or oligonucleotides, e.g., using N-phosphonate or phosphoramidite chemistries (Froehler et al. (1986) Nucleic Acid Res 14:5399-5407; McBride et al. (1983) Tetrahedron Lett. 24:245-248). Synthetic sequences are between about 15 and about 500 bases in length, more typically between about 20 and about 50 bases. In some embodiments, synthetic nucleic acids include non-natural bases, e.g., inosine. As noted above, nucleic acid molecule analogues may be used as binding sites for hybridization. An example of a suitable nucleic acid analogue is peptide nucleic acid (see, e.g., Eghohn et al. (1993) Nature 365:566-568; see also U.S. Pat. No. 5,539,083).

[0468] In an alternative embodiment, the binding (hybridization) sites are made from plasmid or phage clones of genes, cDNAs (e.g., expressed sequence tags), or inserts therefrom (Nguyen et al. (1995) Genomics 29:207-209). In yet another embodiment, the polynucleotide of the binding sites is RNA.

### Attaching Nucleic Acid Molecules to the Solid Surface

[0469] The nucleic acid molecule or analogue are attached to a solid support, which may be made from glass, plastic (e.g., polypropylene, nylon), polyacrylamide, nitrocellulose, or other materials. An example of a method for attaching the nucleic acid molecules to a surface is by printing on glass plates, as is described generally by Schena et al. (1995) Science 270:467-470, the contents of which are expressly incorporated herein by reference. This method is especially useful for preparing arrays of cDNA. See also DeRisi et al (1996) Nature Genetics 14:457-460; Shalon et al. (1996) Genome Res. 6:639-645; and Schena et al. (1995) Proc. Natl. Acad. Sci. USA 93:10539-11286. Each of the aforementioned articles is incorporated by reference in its entirety.

[0470] A second example of a method for making arrays is by making high-density oligonucleotide arrays. Techniques are known for producing arrays containing thousands of oligonucleotides complementary to defined sequences, at defined locations on a surface using photolithographic techniques for synthesis in situ (see, Fodor et al, (1991) Science 251:767-773; Pease et al., (1994) Proc. Natl. Acad. Sci. USA 91:5022-5026; Lockhart et al. (1996) Nature Biotech 14:1675; U.S. Pat. Nos. 5,578,832; 5,556,752; and 5,510,270, each of which is incorporated by reference in its entirety for all purposes) or other methods for rapid synthesis and deposition of defined oligonucleotides (Blanchard et al. (1996) Biosensors & Bioelectronics 11: 687-90). When these methods are used, oligonucleotides (e.g., 20-mers) of known sequence are synthesized directly on a surface such as a derivatized glass slide. In one embodiment, the array produced is redundant, with several oligonucleotide molecules per RNA. Oligonucleotide probes can be chosen to detect alternatively spliced mRNAs.

[0471] Other methods for making arrays, e.g., by masking (Maskos and Southern, 1992, Nuc. Acids Res. 20:1679-1684), may also be used. In principal, any type of array, for example, dot blots on a nylon hybridization membrane (see Sambrook et al., Molecular Cloning—A Laboratory Manual (2nd Ed.), Vol. 1-3, Cold Spring Harbor Laboratory, Cold Spring Harbor, N.Y., 1989, which is hereby incorporated in its entirety), could be used, although, as will be recognized by those of skill in the art, very small arrays will be preferred because hybridization volumes will be smaller.

[0472] Another method for making arrays is to directly deposit the probe on to the array surface. In such an embodiment probes will bind non-covalently or covalently to the array depending on the surface of the array and characteristics of the probe. In preferred embodiments the array has an epoxy coating on top of a glass microscope slide and the probe is modified at the amino terminal by an amine group. This combination of array surface and probe modification results in the covalent binding of the probe. Other methods of coating the array surface include using acrylamide, sialinization and nitrocellulose. There are several methods for direct deposit of the probes on to the array surface. In one embodiment, the probes are deposited using a pin dispense technique. In this technique, pins deposit probes onto the surface either using contact or non-contact printing. One preferred embodiment is non-contact printing using quill tip pins. Another embodiment uses piezo electric dispensing to deposit the probes.

[0473] Control composition may be present on the array including compositions comprising oligonucleotides or polynucleotides corresponding to genomic DNA, housekeeping genes, negative and positive control genes, and the like. These latter types of compositions are not “unique”, i.e., they are “common.” In other words, they are calibrating or control genes whose function is not to tell whether a particular “key” gene of interest is expressed, but rather to provide other useful information, such as background or basal level of expression. The percentage of samples which are made of unique oligonucleotides or polynucleotide that correspond to the same type of gene is generally at least about 30%, and usually at least about 60% and more usually at least about 80%. Preferably, the arrays of the present invention will be of a specific type, e.g., cancer arrays e.g., lung, colon, pancreatic and ovarian cancer.

### Generating Labeled Probes

[0474] Methods for preparing total and poly(A)+ RNA are well known and are described generally in Sambrook et al., supra. In one embodiment, RNA is extracted from cells of the various types of interest in this invention using guanidinium thiocyanate lysis followed by CsCl centrifugation (Chirgwin et al. (1979) Biochemistry 18:5294-5299). Poly(A)+ RNA is selected by selection with oligo-dT cellulose (see Sambrook et al., supra).

[0475] Labeled cDNA is prepared from mRNA by oligo dT-primed or random-primed reverse transcription, both of which are well known in the art (see e.g., Klug and Berger, (1987) Methods Enzymol. 152:316-325). Reverse transcription may be carried out in the presence of a dNTP conjugated to a detectable label, most preferably a fluorescently labeled dNTP. Alternatively, isolated mRNA can be converted to labeled antisense RNA synthesized by in vitro transcription of double-stranded cDNA in the presence of labeled dNTPs (Lockhart et al. (1996) Nature Biotech. 14:1675, the contents of which are expressly incorporated herein by reference). In alternative embodiments, the cDNA or RNA probe can be synthesized in the absence of detectable label and may be labeled subsequently, e.g., by incorporating biotinylated dNTPs or rNTP, or some similar means (e.g., photo-cross-linking a psoralen derivative of biotin to RNAs), followed by addition of labeled streptavidin (e.g., phycoerythrin-conjugated streptavidin) or the equivalent.

[0476] When fluorescently-labeled probes are used, many suitable fluorophores are known, including fluorescein, lissamine, phycoerythrin, rhodamine (Perkin Elmer Cetus™), Cy2, Cy3, Cy3.5, Cy5, Cy5.5, Cy7, Fluor X (Amersham™) and others (see, e.g., Kricka (1992) Nonisotopic DNA Probe Techniques, Academic Press San Diego, Calif.). It will be appreciated that pairs of fluorophores are chosen that have distinct emission spectra so that they can be easily distinguished.

[0477] In another embodiment, a label other than a fluorescent label is used. For example, a radioactive label, or a pair of radioactive labels with distinct emission spectra, can be used (see Zhao et al. (1995) Gene 156:207; Pietu et al. (1996) Genome Res. 6:492). However, because of scattering of radioactive particles, and the consequent requirement for widely spaced binding sites, use of radioisotopes is a less-preferred embodiment.

[0478] In one embodiment, labeled cDNA is synthesized by incubating a mixture containing 0.5 mM dGTP, dATP and dCTP plus 0.1 mM dTTP plus fluorescent deoxyribonucleotides (e.g., 0.1 mM Rhodamine 110 UTP (Perken Elmer Cetus) or 0.1 mM Cy3 dUTP (Amersham™)) with reverse transcriptase (e.g., SuperScript™. II, LTI Inc.) at 42° C. for 60 min.

### Generation of Targets

[0479] In one detection method, the array of immobilized nucleic acid molecules, or probes, is contacted with a target sample containing target nucleic acid molecules, to which a fluorescent label is attached. Target nucleic acid molecules hybridize to the probes on the array and any non-hybridized nucleic acid molecules are removed. The array containing the hybridized target nucleic acid molecules are exposed to light which excites the flourescent label. The resulting fluorescent intensity, or brightness, is detected.

[0480] Tissue samples which are suspected of being metastatic or the metastatic potential of which is unknown can be treated to form single-stranded polynucleotides, for example by heating or by chemical denaturation, as is known in the art. The single-stranded polynucleotides in the tissue sample can then be labeled and hybridized to the polynucleotide probes on the array. Detectable labels which can be used include but are not limited to radiolabels, biotinylated labels, fluorophors, and chemiluminescent labels. Double stranded polynucleotides, comprising the labeled sample polynucleotides bound to polynucleotide probes, can be detected once the unbound portion of the sample is washed away. Detection can be visual or with computer assistance.

[0481] In another method, the target cDNA is generated from RNA derived from selected tissue samples (target samples). In one embodiment, the cDNA is labeled with a molecule which specifically binds with a second molecule which is labeled with one of the detection labels mentioned above for the detection of hybridization. In one embodiment, the cDNA is synthesized using a biotinylated dNTP. The biotinylated target cDNA is then hybridized to the array. There is then a second hybridization using streptavidin labeled with an appropriate fluorphore. The streptavidin will bind specifically to the biotinylated cDNA resulting in the detection of cDNA hybridization to the probe. In another embodiment, the cDNA is synthesized using specific primer sequences which add a capture sequence as the cDNA is being synthesized. The cDNA with the capture sequence is hybridized to the probes on the array. A second hybridization is performed using a fluorescently labeled molecule which binds specifically to the capture sequence. resulting in the detection of cDNA hybridization to the probe. Detection can be visual or with computer assistance.

### Hybridization to Arrays

[0482] Nucleic acid hybridization and wash conditions are chosen so that the probe “specifically binds” or “specifically hybridizes” to a specific array site, i.e., the probe hybridizes, duplexes or binds to a sequence array site with a complementary nucleic acid sequence but does not hybridize to a site with a non-complementary nucleic acid sequence. As used herein, one polynucleotide sequence is considered complementary to another when, if the shorter of the polynucleotides is less than or equal to 25 bases, there are no mismatches using standard base-pairing rules or, if the shorter of the polynucleotides is longer than 25 bases, there is no more than a 5% mismatch. Preferably, the polynucleotides are perfectly complementary (no mismatches). It can easily be demonstrated that specific hybridization conditions result in specific hybridization by carrying out a hybridization assay including negative controls (see, e.g., Shalon et al., supra, and Chee et al., supra).

[0483] Optimal hybridization conditions will depend on the length (e.g., oligomer versus polynucleotide greater than 200 bases) and type (e.g., RNA, DNA, PNA) of labeled probe and immobilized polynucleotide or oligonucleotide. General parameters for specific (i.e., stringent) hybridization conditions for nucleic acid molecules are described in Sambrook et al., supra, and in Ausubel et al., 1987, Current Protocols in Molecular Biology, Greene Publishing and Wiley-Interscience, New York, which is incorporated in its entirety for all purposes. Such stringent conditions are known to those skilled in the art and can be found in sections 6.3.1-6.3.6 of Current Protocols in Molecular Biology, John Wiley & Sons, N.Y. (1989). A non-limiting example of stringent hybridization conditions are hybridization in 6× sodium chloride/sodium citrate (SSC) at about 45° C., followed by one or more washes in 0.2×SSC, 0.1% SDS at 50-65° C. Useful hybridization conditions are also provided in, e.g., Tijessen, 1993, Hybridization With Nucleic Acid Probes, Elsevier Science Publishers B.V. and Kricka, 1992, Nonisotopic DNA Probe Techniques, Academic Press San Diego, Calif.

### Signal Detection and Data Analysis

[0484] When fluorescently labeled probes are used, the fluorescence emissions at each site of a transcript array can be, preferably, detected by scanning confocal laser microscopy. In one embodiment, a separate scan, using the appropriate excitation line, is carried out for each of the two fluorophores used. Alternatively, a laser can be used that allows simultaneous specimen illumination at wavelengths specific to the two fluorophores and emissions from the two fluorophores can be analyzed simultaneously (see Shalon et al., 1996, A DNA array system for analyzing complex DNA samples using two-color fluorescent probe hybridization, Genome Research 6:639-645, which is incorporated by reference in its entirety for all purposes). The arrays may be scanned with a laser fluorescent scanner with a computer controlled X-Y stage and a microscope objective. Sequential excitation of the two fluorophores is achieved with a multi-line, mixed gas laser and the emitted light is split by wavelength and detected with two photomultiplier tubes. Fluorescence laser scanning devices 35 are described in Schena et al., 1996, Genome Res. 6:639-645 and in other references cited herein. Alternatively, the fiber-optic bundle described by Ferguson et al., 1996, Nature Biotech. 14:1681-1684, may be used to monitor mRNA abundance levels at a large number of sites simultaneously.

[0485] Signals are recorded and, in one embodiment, analyzed by computer, e.g., using a 12 bit analog to digital board. In one embodiment the scanned image is despeckled using a graphics program (e.g., Hijaak Graphics Suite) and then analyzed using an image gridding program that creates a spreadsheet of the average hybridization at each wavelength at each site. If necessary, an experimentally determined correction for “cross talk” (or overlap) between the channels for the two fluors may be made. For any particular hybridization site on the transcript array, a ratio of the emission of the two fluorophores can be calculated. The ratio is independent of the absolute expression level of the cognate gene, but is useful for genes whose expression is significantly modulated by drug administration, gene deletion, or any other tested event. According to the method of the invention, the relative abundance of an mRNA in two cells or cell lines is scored as a perturbation (i.e., the abundance is different in the two sources of mRNA tested), or as not perturbed (i.e., the relative abundance is the same). As used herein, a difference between the two sources of RNA of at least a factor of about 25% (RNA from one source is 25% more abundant in one source than the other source), more usually about 50%, even more often by a factor of about 2 (twice as abundant), 3 (three times as abundant) or 5 (five times as abundant) is scored as a perturbation. Present detection methods allow reliable detection of difference of an order of about 3-fold to about 5-fold, but more sensitive methods are expected to be developed.

[0486] In some cases, in addition to identifying a perturbation as positive or negative, it is advantageous to determine the magnitude of the perturbation. This can be carried out, as noted above, by calculating the ratio of the emission of the two fluorophores used for differential labeling, or by analogous methods that will be readily apparent to those of skill in the art.

[0487] In another embodiment, a single fluorophore is used and all of the hybridizations from the samples are detected at a single wave length. In this method, the samples are all compared with each other to determine expression levels. The expression levels for the membrane associated molecules are determined by comparing fluorescence intensity values from all of the samples from the same wavelength. There are several different methods used for data analysis using a single fluorophore for hybridization. One method is using global normalization. Briefly, the intensity values from all of the sequences are averaged for each sample. All of the sample intensity averages are then averaged to determine the experimental intensity average. A correction factor is calculated for each sample by dividing the experimental intensity average by the sample averages. All of the sequence intensity values are multiplied by the correction factor. Following normalization, the malignant sample values are divided by the nonmalignant sample values to determine the fold expression change.

[0488] Another method to analyze the intensity values uses a nonparametric analysis. Nonparametric statistical analysis of microarray data is performed by Spearman Rank Analysis. In the first method, each gene is ranked in order of measured fluorescence intensity within each sample and ranks are compared between tumor samples and grouped normal samples. The statistical significance of each comparison is recorded. In the second method, each gene is ranked in order of measured fluorescence intensity across samples and ranks are compared between tumor samples and grouped normal samples. The statistical significance of each comparison is recorded. For each method, each gene is counted for the number of tumor samples that had statistically higher rank than the normal samples for each tumor indication.

### Diagnostic Assays

[0489] An exemplary method for detecting the presence or absence of a marker protein or nucleic acid in a biological sample involves obtaining a biological sample from a test subject and contacting the biological sample with a compound or an agent capable of detecting the polypeptide or nucleic acid (e.g., mRNA, genomic DNA, or cDNA). The detection methods of the invention can thus be used to detect mRNA, protein, cDNA, or genomic DNA, for example, in a biological sample in vitro as well as in vivo. For example, in vitro techniques for detection of mRNA include Northern hybridizations and in situ hybridizations. In vitro techniques for detection of a marker protein include enzyme linked immunosorbent assays (ELISAs), Western blots, immunoprecipitations and immunofluorescence. In vitro techniques for detection of genomic DNA include Southern hybridizations. Furthermore, in vivo techniques for detection of a marker protein include introducing into a subject a labeled antibody directed against the protein or fragment thereof. For example, the antibody can be labeled with a radioactive marker whose presence and location in a subject can be detected by standard imaging techniques.

[0490] A general principle of such diagnostic and prognostic assays involves preparing a sample or reaction mixture that may contain a marker, and a probe, under appropriate conditions and for a time sufficient to allow the marker and probe to interact and bind, thus forming a complex that can be removed and/or detected in the reaction mixture. These assays can be conducted in a variety of ways.

[0491] For example, one method to conduct such an assay would involve anchoring the markers or probes onto a solid phase support to create an array, as described herein, where more than one marker or probe is used, also referred to as a substrate, and detecting target marker/probe complexes anchored on the solid phase at the end of the reaction. In one embodiment of such a method, a sample from a subject, which is to be assayed for presence and/or concentration of marker, can be anchored onto a carrier or solid phase support. In another embodiment, the reverse situation is possible, in which the probe can be anchored to a solid phase and a sample from a subject can be allowed to react as an unanchored component of the assay.

[0492] There are many established methods for anchoring assay components to a solid phase. These include, without limitation, marker or probe molecules which are immobilized through conjugation of biotin and streptavidin. Such biotinylated assay components can be prepared from biotin-NHS (N-hydroxy-succinimide) using techniques known in the art (e.g., biotinylation kit, Pierce Chemicals, Rockford, Ill.), and immobilized in the wells of streptavidin-coated 96 well plates (Pierce Chemical). In certain embodiments, the surfaces with immobilized assay components can be prepared in advance and stored.

[0493] Other suitable carriers or solid phase supports for such assays include any material capable of binding the class of molecule to which the marker or probe belongs. Well-known supports or carriers include, but are not limited to, glass, polystyrene, nylon, polypropylene, nylon, polyethylene, dextran, amylases, natural and modified celluloses, polyacrylamides, gabbros, and magnetite.

[0494] In order to conduct assays with the above mentioned approaches, the non-immobilized component is added to the solid phase upon which the second component is anchored. After the reaction is complete, uncomplexed components may be removed (e.g., by washing) under conditions such that any complexes formed will remain immobilized upon the solid phase. The detection of marker/probe complexes anchored to the solid phase can be accomplished in a number of methods outlined herein.

[0495] In one embodiment, the probe, when it is the unanchored assay component, can be labeled for the purpose of detection and readout of the assay, either directly or indirectly, with detectable labels discussed herein and which are well-known to one skilled in the art.

[0496] It is also possible to directly detect marker/probe complex formation without further manipulation or labeling of either component (marker or probe), for example by utilizing the technique of fluorescence energy transfer (see, for example, Lakowicz et al., U.S. Pat. No. 5,631,169; Stavrianopoulos, et al., U.S. Pat. No. 4,868,103). A fluorophore label on the first, ‘donor’ molecule is selected such that, upon excitation with incident light of appropriate wavelength, its emitted fluorescent energy will be absorbed by a fluorescent label on a second ‘acceptor’ molecule, which in turn is able to fluoresce due to the absorbed energy. Alternately, the ‘donor’ protein molecule may simply utilize the natural fluorescent energy of tryptophan residues. Labels are chosen that emit different wavelengths of light, such that the ‘acceptor’ molecule label may be differentiated from that of the ‘donor’. Since the efficiency of energy transfer between the labels is related to the distance separating the molecules, spatial relationships between the molecules can be assessed. In a situation in which binding occurs between the molecules, the fluorescent emission of the ‘acceptor’ molecule label in the assay should be maximal. An FET binding event can be conveniently measured through standard fluorometric detection means well known in the art (e.g., using a fluorimeter).

[0497] In another embodiment, determination of the ability of a probe to recognize a marker can be accomplished without labeling either assay component (probe or marker) by utilizing a technology such as real-time Biomolecular Interaction Analysis (BIA) (see, e.g., Sjolander, S, and Urbaniczky, C., 1991, Anal. Chem. 63:2338-2345 and Szabo et al., 1995, Curr. Opin. Struct. Biol. 5:699-705). As used herein, “BIA” or “surface plasmon resonance” is a technology for studying biospecific interactions in real time, without labeling any of the interactants (e.g., BIAcore). Changes in the mass at the binding surface (indicative of a binding event) result in alterations of the refractive index of light near the surface (the optical phenomenon of surface plasmon resonance (SPR)), resulting in a detectable signal which can be used as an indication of real-time reactions between biological molecules.

[0498] Alternatively, in another embodiment, analogous diagnostic and prognostic assays can be conducted with marker and probe as solutes in a liquid phase. In such an assay, the complexed marker and probe are separated from uncomplexed components by any of a number of standard techniques, including but not limited to: differential centrifugation, chromatography, electrophoresis and immunoprecipitation. In differential centrifugation, marker/probe complexes may be separated from uncomplexed assay components through a series of centrifugal steps, due to the different sedimentation equilibria of complexes based on their different sizes and densities (see, for example, Rivas, G., and Minton, A. P., 1993, Trends Biochem Sci. 18(8):284-7). Standard chromatographic techniques may also be utilized to separate complexed molecules from uncomplexed ones. For example, gel filtration chromatography separates molecules based on size, and through the utilization of an appropriate gel filtration resin in a column format, for example, the relatively larger complex may be separated from the relatively smaller uncomplexed components. Similarly, the relatively different charge properties of the marker/probe complex as compared to the uncomplexed components may be exploited to differentiate the complex from uncomplexed components, for example through the utilization of ion-exchange chromatography resins. Such resins and chromatographic techniques are well known to one skilled in the art (see, e.g., Heegaard, N. H., 1998, J. Mol. Recognit. Winter 11(1-6):141-8; Hage, D. S., and Tweed, S. A. J Chromatogr B Biomed Sci Appl 1997 Oct. 10; 699(1-2):499-525). Gel electrophoresis may also be employed to separate complexed assay components from unbound components (see, e.g., Ausubel et al., ed., Current Protocols in Molecular Biology, John Wiley & Sons, New York, 1987-1999). In this technique, protein or nucleic acid complexes are separated based on size or charge, for example. In order to maintain the binding interaction during the electrophoretic process, non-denaturing gel matrix materials and conditions in the absence of reducing agent are typically preferred. Appropriate conditions to the particular assay and components thereof will be well known to one skilled in the art.

[0499] In a particular embodiment, the level of marker mRNA can be determined both by in situ and by in vitro formats in a biological sample using methods known in the art. The term “biological sample” is intended to include tissues, cells, biological fluids and isolates thereof, isolated from a subject, as well as tissues, cells and fluids present within a subject. Many expression detection methods use isolated RNA. For in vitro methods, any RNA isolation technique that does not select against the isolation of mRNA can be utilized for the purification of RNA from cells (see, e.g., Ausubel et al., ed., Current Protocols in Molecular Biology, John Wiley & Sons, New York 1987-1999). Additionally, large numbers of tissue samples can readily be processed using techniques well known to those of skill in the art, such as, for example, the single-step RNA isolation process of Chomczynski (1989, U.S. Pat. No. 4,843,155).

[0500] The isolated mRNA can be used in hybridization or amplification assays that include, but are not limited to, Southern or Northern analyses, polymerase chain reaction analyses and probe arrays. One diagnostic method for the detection of mRNA levels involves contacting the isolated mRNA with a nucleic acid molecule (probe) that can hybridize to the mRNA encoded by the gene being detected. The nucleic acid probe can be, for example, a full-length cDNA, or a portion thereof, such as an oligonucleotide of at least 7, 15, 30, 50, 100, 250 or 500 nucleotides in length and sufficient to specifically hybridize under stringent conditions to a mRNA or genomic DNA encoding a marker of the present invention. Other suitable probes for use in the diagnostic assays of the invention are described herein. Hybridization of an mRNA with the probe indicates that the marker in question is being expressed.

[0501] In one format, the mRNA is immobilized on a solid surface and contacted with a probe, for example by running the isolated mRNA on an agarose gel and transferring the mRNA from the gel to a membrane, such as nitrocellulose. In an alternative format, the probe(s) are immobilized on a solid surface and the mRNA is contacted with the probe(s), for example, in an array as described herein. A skilled artisan can readily adapt known mRNA detection methods for use in detecting the level of mRNA encoded by the markers of the present invention.

[0502] An alternative method for determining the level of mRNA marker in a sample involves the process of nucleic acid amplification, e.g., by rtPCR (the experimental embodiment set forth in Mullis, 1987, U.S. Pat. No. 4,683,202), ligase chain reaction (Barany, 1991, Proc. Natl. Acad. Sci. USA, 88:189-193), self sustained sequence replication (Guatelli et al., 1990, Proc. Natl. Acad. Sci. USA 87:1874-1878), transcriptional amplification system (Kwoh et al., 1989, Proc. Natl. Acad. Sci. USA 86:1173-1177), Q-Beta Replicase (Lizardi et al., 1988, Bio/Technology 6:1197), rolling circle replication (Lizardi et al., U.S. Pat. No. 5,854,033) or any other nucleic acid amplification method, followed by the detection of the amplified molecules using techniques well known to those of skill in the art. These detection schemes are especially useful for the detection of nucleic acid molecules if such molecules are present in very low numbers. As used herein, amplification primers are defined as being a pair of nucleic acid molecules that can anneal to 5′ or 3′ regions of a gene (plus and minus strands, respectively, or vice-versa) and contain a short region in between. In general, amplification primers are from about 10 to 30 nucleotides in length and flank a region from about 50 to 200 nucleotides in length. Under appropriate conditions and with appropriate reagents, such primers permit the amplification of a nucleic acid molecule comprising the nucleotide sequence flanked by the primers.

[0503] For in situ methods, mRNA does not need to be isolated from cells prior to detection. In such methods, a cell or tissue sample is prepared/processed using known histological methods. The sample is then immobilized on a support, typically a glass slide, and then contacted with a probe that can hybridize to mRNA that encodes the marker.

[0504] As an alternative to making determinations based on the absolute expression level of the marker, determinations may be based on the normalized expression level of the marker. Expression levels are normalized by correcting the absolute expression level of a marker by comparing its expression to the expression of a gene that is not a marker, e.g., a housekeeping gene that is constitutively expressed. Suitable genes for normalization include housekeeping genes such as the actin gene, or epithelial cell-specific genes. This normalization allows the comparison of the expression level in one sample, e.g., a patient sample, to another sample, e.g., sample not associated with a hyperproliferative disease or disorder, or between samples from different sources.

[0505] Alternatively, the expression level can be provided as a relative expression level. To determine a relative expression level of a marker, the level of expression of the marker is determined for 10 or more samples of normal versus cancer cell isolates, preferably 50 or more samples, prior to the determination of the expression level for the sample in question. The mean expression level of each of the genes assayed in the larger number of samples is determined and this is used as a baseline expression level for the marker. The expression level of the marker determined for the test sample (absolute level of expression) is then divided by the mean expression value obtained for that marker. This provides a relative expression level.

[0506] Preferably, the samples used in the baseline determination will be from cells from a subject associated with a hyperproliferative disease or disorder or from cells not associated with a hyperproliferative disease or disorder. The choice of the cell source is dependent on the use of the relative expression level. Using expression found in normal tissues as a mean expression score aids in validating whether the marker assayed is specific to cells associated with a hyperproliferative disease or disorder (versus normal cells). In addition, as more data is accumulated, the mean expression value can be revised, providing improved relative expression values based on accumulated data. Expression data from cells provides a means for grading the severity of the hyperproliferative disease or disorder

[0507] In another embodiment of the present invention, a marker protein is detected. An example of an agent for detecting marker protein of the invention is an antibody capable of binding to such a protein or a fragment thereof, preferably an antibody with a detectable label. Antibodies can be polyclonal, or more preferably, monoclonal. An intact antibody, or a fragment or derivative thereof (e.g., Fab or F(ab′)2) can be used. The term “labeled”, with regard to the probe or antibody, is intended to encompass direct labeling of the probe or antibody by coupling (i.e., physically linking) a detectable substance to the probe or antibody, as well as indirect labeling of the probe or antibody by reactivity with another reagent that is directly labeled. Examples of indirect labeling include detection of a primary antibody using a fluorescently labeled secondary antibody and end-labeling of a DNA probe with biotin such that it can be detected with fluorescently labeled streptavidin.

[0508] Proteins from cells can be isolated using techniques that are well known to those of skill in the art. The protein isolation methods employed can, for example, be such as those described in Harlow and Lane (Harlow and Lane, 1988, Antibodies: A Laboratory Manual, Cold Spring Harbor Laboratory Press, Cold Spring Harbor, N.Y.).

[0509] A variety of formats can be employed to determine whether a sample contains a protein that binds to a given antibody. Examples of such formats include, but are not limited to, enzyme immunoassay (EIA), radioimmunoassay (RIA), Western blot analysis and enzyme linked immunoabsorbant assay (ELISA). A skilled artisan can readily adapt known protein/antibody detection methods for use in determining whether cells express a marker of the present invention.

[0510] In one format, antibodies, or antibody fragments or derivatives, can be used in methods such as Western blots or immunofluorescence techniques to detect the expressed proteins. In such uses, it is generally preferable to immobilize either the antibody or proteins on a solid support. Suitable solid phase supports or carriers include any support capable of binding an antigen or an antibody. Well-known supports or carriers include glass, polystyrene, polypropylene, polyethylene, dextran, nylon, amylases, natural and modified celluloses, polyacrylamides, gabbros, and magnetite. One skilled in the art will know many other suitable carriers for binding antibody or antigen, and will be able to adapt such support for use with the present invention. For example, protein isolated from cells can be run on a polyacrylamide gel electrophoresis and immobilized onto a solid phase support such as nitrocellulose. The support can then be washed with suitable buffers followed by treatment with the detectably labeled antibody. The solid phase support can then be washed with the buffer a second time to remove unbound antibody. The amount of bound label on the solid support can then be detected by conventional means.

[0511] The invention also encompasses kits for detecting the presence of a marker protein or nucleic acid in a biological sample. Such kits can be used to determine if a subject is suffering from or is at increased risk of developing a hyperproliferative disease or disorder. For example, the kit can comprise a labeled compound or agent capable of detecting a marker protein or nucleic acid in a biological sample and means for determining the amount of the protein or mRNA in the sample (e.g., an antibody which binds the protein or a fragment thereof, or an oligonucleotide probe which binds to DNA or mRNA encoding the protein). Kits can also include instructions for interpreting the results obtained using the kit.

[0512] For antibody-based kits, the kit can comprise, for example: (1) a first antibody (e.g., attached to a solid support) which binds to a marker protein; and, optionally, (2) a second, different antibody which binds to either the protein or the first antibody and is conjugated to a detectable label.

[0513] For oligonucleotide-based kits, the kit can comprise, for example: (1) an oligonucleotide, e.g., a detectably labeled oligonucleotide, which hybridizes to a nucleic acid sequence encoding a marker protein or (2) a pair of primers useful for amplifying a marker nucleic acid molecule. The kit can also comprise, e.g., a buffering agent, a preservative, or a protein stabilizing agent. The kit can further comprise components necessary for detecting the detectable label (e.g., an enzyme or a substrate). The kit can also contain a control sample or a series of control samples which can be assayed and compared to the test sample. Each component of the kit can be enclosed within an individual container and all of the various containers can be within a single package, along with instructions for interpreting the results of the assays performed using the kit.

### Surrogate Markers

[0514] The markers of the invention may serve as surrogate markers for one or more disorders or disease states or for conditions leading up to disease states, and in particular, a hyperproliferative disease or disorder. As used herein, a “surrogate marker” is an objective biochemical marker which correlates with the absence or presence of a disease or disorder, or with the progression of a disease or disorder (e.g., with the presence or absence of a tumor). The presence or quantity of such markers is independent of the disease. Therefore, these markers may serve to indicate whether a particular course of treatment is effective in lessening a disease state or disorder. Surrogate markers are of particular use when the presence or extent of a disease state or disorder is difficult to assess through standard methodologies (e.g., early stage tumors), or when an assessment of disease progression is desired before a potentially dangerous clinical endpoint is reached (e.g., an assessment of cardiovascular disease may be made using cholesterol levels as a surrogate marker, and an analysis of HIV infection may be made using HIV RNA levels as a surrogate marker, well in advance of the undesirable clinical outcomes of myocardial infarction or fully-developed AIDS). Examples of the use of surrogate markers in the art include: Koomen et al. (2000) J. Mass. Spectrom. 35: 258-264; and James (1994) AIDS Treatment News Archive 209.

[0515] The markers of the invention are also useful as pharmacodynamic markers. As used herein, a “pharmacodynamic marker” is an objective biochemical marker which correlates specifically with drug effects. The presence or quantity of a pharmacodynamic marker is not related to the disease state or disorder for which the drug is being administered; therefore, the presence or quantity of the marker is indicative of the presence or activity of the drug in a subject. For example, a pharmacodynamic marker may be indicative of the concentration of the drug in a biological tissue, in that the marker is either expressed or transcribed or not expressed or transcribed in that tissue in relationship to the level of the drug. In this fashion, the distribution or uptake of the drug may be monitored by the pharmacodynamic marker. Similarly, the presence or quantity of the pharmacodynamic marker may be related to the presence or quantity of the metabolic product of a drug, such that the presence or quantity of the marker is indicative of the relative breakdown rate of the drug in vivo. Pharmacodynamic markers are of particular use in increasing the sensitivity of detection of drug effects, particularly when the drug is administered in low doses. Since even a small amount of a drug may be sufficient to activate multiple rounds of marker transcription or expression, the amplified marker may be in a quantity which is more readily detectable than the drug itself. Also, the marker may be more easily detected due to the nature of the marker itself; for example, using the methods described herein, antibodies may be employed in an immune-based detection system for a protein marker, or marker-specific radiolabeled probes may be used to detect a mRNA marker. Furthermore, the use of a pharmacodynamic marker may offer mechanism-based prediction of risk due to drug treatment beyond the range of possible direct observations. Examples of the use of pharmacodynamic markers in the art include: Matsuda et al. U.S. Pat. No. 6,033,862; Hattis et al. (1991) Env. Health Perspect. 90: 229-238; Schentag (1999) Am. J. Health-Syst. Pharm. 56 Suppl. 3: S21-S24; and Nicolau (1999) Am, J. Health-Syst. Pharm. 56 Suppl. 3: S16-S20.

[0516] All of the references cited above, as well as all references cited herein, are incorporated herein by reference in their entireties.

### EXEMPLIFICATION

[0517] This invention is further illustrated by the following examples, which should not be construed as limiting. The contents of all references, Tables, Figures, Sequence Listings, patents and published patent applications cited throughout this application are hereby incorporated by reference. Additionally, all nucleotide and amino acid sequences deposited in public databases referred to herein are also hereby incorporated by reference.

### Example 1

[0518] This example illustrates the process used to assemble the screening signature set outlined in FIG. 1.

[0519] The Ensemble™ predicted protein database was queried using a model of membrane topology prediction, the Transmembrane Hidden Markov Model (TMHMM), algorithm to select sequences predicted to contain a transmembrane domain. This group of sequences was termed the transmembrane selection set and contains 5661 sequences. The sequences in the transmembrane selection set were then compared to the sequences on the Affymetrix U133 set and Affymetrix U95 set expression arrays. Those sequences without substantial homology (<96% identity to sequences on the Affymetrix arrays) were then associated to form the transmembrane signature set. This transmembrane signature set was composed of 768 sequences.

[0520] Those sequences with substantial homology to the array associated molecules (>96% identity to sequences on the Affymetrix arrays), that were excluded from the transmembrane signature set were then used to query an expression database. The GeneLogic cancer suite was queried and any sequence which was associated with substantial intensity values was omitted. Here, sequences which were present in >5% of the patient samples in at most 5 sample sets were selected for the expression signature set. Upon completion of the screening the expression signature set contained 1175 sequences.

[0521] The expression signature set and the transmembrane signature set were then combined and manually validated. Manual validation consisted of determining cellular localization. Any sequences which were known to be cell surface molecules or which localization was unknown were grouped together to provide a master transmembrane signature set. The master transmembrane signature set contained 984 sequences.

[0522] To further improve the identification power of the array, the Ensemble™ predicted protein database was queried for sequences predicted to contain ITIM, ITAM, ITSM or GPI link motifs. The database was queried for [I/V]XYXXL sequence to identify ITIM motifs, YXX[L/V]X7-11YXX[L/V] to identify ITAM motifs and [S/T]XTXXX[V/I] to identify ITSM motifs. GPI link motifs were identified using several methods. Each sequence was analyzed by a signal sequence prediction program, Signal P, for the presence of an amino terminal signal sequence. Each sequence was analyzed by a hydropathy determination program for the presence of hydrophobic residues at the carboxy terminal. Each sequence was additionally analyzed for the presence of cleavage sites at both ends of the molecule typically found in GPI link motif molecules. The pattern at the amino cleavage site is [GAS]X[GASCT], pattern at the carboxy cleavage site is [GASCDN]X[GAS]. Together the sequences identified as having ITIM, ITAM, ITSM or GPI motifs were selected for the group termed motif selection set which contained 636 sequences.

[0523] The motif selection set was then compared to the sequences on the Affymetrix U133 set and Affymetrix U95 set expression arrays. Those sequences without substantial homology to the array associated molecules (<96% identity to sequences on the Affymetrix arrays) were selected for the group termed the motif signature set which contained 149 sequences.

[0524] The master transmembrane signature set (984 sequences) and the motif signature set (149 sequences) were combined to form the screening signature set (1133 sequences), which was used to generate an array for use in further experiments to identify membrane associated molecules exhibiting altered expression profiles in tumor samples.

[0525] In addition, 13 control sequences were selected for inclusion with the screening signature set. One skilled in the art will appreciate the use of these sequences as positive and negative controls for the experiment. The final screening signature set contained 1146 sequences, of which SEQ ID NOs: 1134-1146 are the control sequences (see Table 6).

### Example 2

[0526] This example illustrates the methods used to design and manufacture an expression array using the screening set of sequences.

[0527] The probe design, oligo synthesis and array manufacture were completed by MWG Biotech AG (Ebersberg, Germany). MWG Biotech used the CodeSeq Database and oligonucleotides4Array Design software to design unique probes for each sequence. oligonucleotides4Array software is used to design oligonucleotides with the correct physical requirements (e.g., melting temperature, GC content, secondary structure probability, dimerization), and performs Blast and Smith-Waterman alignments of oligonucleotides to the Codeseq Database. Smith-Waterman alignments algorithm is used to ensure that homology between the probe and any other gene sequence is >75%. The CodeSeq Database is a proprietary database of gene sequences used to ensure that the oligonucleotides bind uniquely to the appropriate sequence. MWG Biotech designed oligonucleotides which are 50 nucleotides in length.

[0528] MWG Biotech then synthesized the selected oligonucleotides. All of the oligonucleotides were quality controlled using analysis on MALDI TOF which ensures the sequence identity by molecular weight and verifies complete and successful purification of the oligonucleotides. The oligonucleotides are synthesized with the amino terminal modified with an MMT group.

[0529] The oligonucleotides were then arrayed on MWG Biotech epoxy coated slides to provide arrays in accordance with the present invention. The slides used in this embodiment are glass microscope slides with an epoxy coating. The epoxy surface allows for covalent binding with the amino group of the modified oligonucleotides. The oligonucleotides were arrayed using pin printing technology with quill tips. The resulting arrays were then used in further experiments to identify membrane associated molecules which are indicative of proliferative disorders.

### Example 3

[0530] This example illustrates the identification of SEQ ID NO:142 (a polynucleotide corresponding to a membrane associated molecule) as a marker or therapeutic target for colon cancer. The hybridization of target with the expression arrays was outsourced to Genisphere Inc (Hatfield, Pa.). Genisphere uses a proprietary dendramer technique for detection of target hybridization.

[0531] Target samples were generated from tumor tissue obtained from patients along with appropriate controls. RNA was isolated from malignant and nonmalignant tissue samples using Qiagen RNeasy maxi kit according to the manufacturer's instructions. The resulting total RNA was analyzed by spectrophotometer and agarose gel to ensure the quality and integrity of the RNA. Good quality RNA was DNase treated using Invitrogen's DNase I and then cleaned up and concentrated using Qiagen's MinElute kit. The DNase treated RNA was then used in Invitrogen's First Strand Synthesis Kit to synthesize cDNA. During cDNA synthesis primers from Genisphere were used. These primers tag the cDNA as it is being synthesized with a capture sequence that is used in the detection phase of the experiment.

[0532] The cDNA was hybridized to the array generated from the screening signature set of sequences by Genisphere Inc. Briefly, the cDNA was incubated with the arrays in 2×SDS buffer (0.5 M NaPO4), 1% SDS, 2 mM EDTA, 2×SSC, 4×Denhardt's solution) for 16-24 hrs at 55-60° C., and washed using 2×SSC with 0.2% SDS, 2×SSC and 0.2×SSC at 42° C. Following the washes the arrays were incubate with the fluorescently labeled (CY3) dendramer from Genisphere for 2.5-3 hours. The arrays were then washed using 2×SSC with 0.2% SDS at 42° C. and 2×SSC and 0.2×SSC at room temperature. The arrays were then scanned on an Axon scanner at 546 wavelength to measure intensity and detect hybridization.

[0533] The data from the arrays was analyzed using global analysis methods. Briefly, the intensity values from all of the sequences were averaged for each sample. All of the sample intensity averages were then averaged to determine the experimental intensity average. A correction factor was calculated for each sample by dividing the experimental intensity average by the sample averages. All of the sequence intensity values were multiplied by the correction factor. Following normalization, the malignant sample values were divided by the nonmalignant sample values to determine the fold expression change.

[0534] The fold expression values for SEQ ID NO:142 in malignant colon samples are shown in Table 11. On average, SEQ ID NO:142 is overexpressed 4.9 fold in malignant colon samples compared to nonmalignant colon and is considered a potential marker or therapeutic target for colon cancer. The membrane associated molecule encoded by SEQ ID NO:142 is known in the literature as MUC-4 (mucin 4).

[0535] Those skilled in the art will recognize, or be able to ascertain using no more than routine experimentation, many equivalents to the specific embodiments of the invention described herein. Such equivalents are intended to be encompassed by the following claims.

### Example 4

### Quantitative PCR (QPCR)

[0536] A subset of genes identified from the custom chip as upregulated in colon cancer was evaluated by quantitative PCR. FIG. 2 depicts the results for seven genes; SEQ ID NO:3446, SEQ ID NO:3447, SEQ ID NO:3448, SEQ ID NO:3449, SEQ ID NO:3450, SEQ ID NO:3451 and SEQ ID NO:3452. These genes showed higher expression in colon tumors compared to normal colon, consistent with results obtained from the microarray. The human tissue samples were obtained through Sharp Grossmont Hospital (La Mesa, Calif.) and from commercial sources (Asterand Inc., Detroit Mich. and the Cooperative Human Tissue Network, Nashville Tenn.) RNA and cDNA were prepared from samples using Qiagen RNEasy kits (Qiagen Inc, Valencia, Calif.) and Superscript First Strand Synthesis System (Invitrogen, Carlsbad, Calif.) essentially according to manufacturer specifications. cDNA integrity was measured using the RNA 6000 Nano Assay on the Agilent 2100 Bioanalyzer (Agilent, Palo Alto, Calif.). Concentrations were normalized and used for TaqMan™ gene expression analysis. Assays were performed in triplicate on the ABI Prism 7900 instrument (Applied Biosystems) using 25 μl reactions containing 1×TaqMan Universal PCR Master Mix (Applied Biosystems), 900 nM each primer, 250 nM probe and approximately 1-20 ng cDNA. For every gene target analyzed, cycle threshold values were determined for both GAPDH and the target of interest. Comparative CT analysis was used to establish an expression value for each target of interest normalized to GAPDH. Finally, the data were presented as fold change in expression, relative to the tissue having the lowest normalized value for that experiment.

[0537] The present invention is not to be limited in scope by the specific embodiments described which are intended as single illustrations of individual aspects of the invention, and any compositions or methods which are functionally equivalent are within the scope of this invention. Indeed, various modifications of the invention in addition to those shown and described herein will become apparent to those skilled in the art from the foregoing description and accompanying drawings. Such modifications are intended to fall within the scope of the appended claims.

[0538] All publications and patent applications mentioned in this specification are herein incorporated by reference to the same extent as if each individual publication or patent application was specifically and individually indicated to be incorporated by reference.

TABLE 6

| Nucleotide ID | Protein ID | Probe ID | Colon | Lung | Pancreas | Ovarian |
|---|---|---|---|---|---|---|
| Seq ID 001 | Seq ID 1147 | Seq ID 2293 | X | | | |
| Seq ID 002 | Seq ID 1148 | Seq ID 2294 | | | | |
| Seq ID 003 | Seq ID 1149 | Seq ID 2295 | | | | |
| Seq ID 004 | Seq ID 1150 | Seq ID 2296 | | | | |
| Seq ID 005 | Seq ID 1151 | Seq ID 2297 | | | | |
| Seq ID 006 | Seq ID 1152 | Seq ID 2298 | | | | |
| Seq ID 007 | Seq ID 1153 | Seq ID 2299 | | | | |
| Seq ID 008 | Seq ID 1154 | Seq ID 2300 | X | | | |
| Seq ID 009 | Seq ID 1155 | Seq ID 2301 | X | | | |
| Seq ID 010 | Seq ID 1156 | Seq ID 2302 | | | | |
| Seq ID 011 | Seq ID 1157 | Seq ID 2303 | | | | |
| Seq ID 012 | Seq ID 1158 | Seq ID 2304 | | | | |
| Seq ID 013 | Seq ID 1159 | Seq ID 2305 | X | | | |
| Seq ID 014 | Seq ID 1160 | Seq ID 2306 | X | | | X |
| Seq ID 015 | Seq ID 1161 | Seq ID 2307 | | | | |
| Seq ID 016 | Seq ID 1162 | Seq ID 2308 | | | | |
| Seq ID 017 | Seq ID 1163 | Seq ID 2309 | | | | |
| Seq ID 018 | Seq ID 1164 | Seq ID 2310 | | | | |
| Seq ID 019 | Seq ID 1165 | Seq ID 2311 | X | | | |
| Seq ID 020 | Seq ID 1166 | Seq ID 2312 | | | | |
| Seq ID 021 | Seq ID 1167 | Seq ID 2313 | | | | |
| Seq ID 022 | Seq ID 1168 | Seq ID 2314 | | | | |
| Seq ID 023 | Seq ID 1169 | Seq ID 2315 | X | | | |
| Seq ID 024 | Seq ID 1170 | Seq ID 2316 | | | | |
| Seq ID 025 | Seq ID 1171 | Seq ID 2317 | X | | | |
| Seq ID 026 | Seq ID 1172 | Seq ID 2318 | | | | |
| Seq ID 027 | Seq ID 1173 | Seq ID 2319 | | | | |
| Seq ID 028 | Seq ID 1174 | Seq ID 2320 | X | | | |
| Seq ID 029 | Seq ID 1175 | Seq ID 2321 | | | | |
| Seq ID 030 | Seq ID 1176 | Seq ID 2322 | | | | |
| Seq ID 031 | Seq ID 1177 | Seq ID 2323 | | | | |
| Seq ID 032 | Seq ID 1178 | Seq ID 2324 | | | | |
| Seq ID 033 | Seq ID 1179 | Seq ID 2325 | | | | |
| Seq ID 034 | Seq ID 1180 | Seq ID 2326 | | X | | |
| Seq ID 035 | Seq ID 1181 | Seq ID 2327 | | | | |
| Seq ID 036 | Seq ID 1182 | Seq ID 2328 | | | | |
| Seq ID 037 | Seq ID 1183 | Seq ID 2329 | | | | |
| Seq ID 038 | Seq ID 1184 | Seq ID 2330 | | | | |
| Seq ID 039 | Seq ID 1185 | Seq ID 2331 | | | | |
| Seq ID 040 | Seq ID 1186 | Seq ID 2332 | | | | |
| Seq ID 041 | Seq ID 1187 | Seq ID 2333 | | | | |
| Seq ID 042 | Seq ID 1188 | Seq ID 2334 | | | | |
| Seq ID 043 | Seq ID 1189 | Seq ID 2335 | | | | |
| Seq ID 044 | Seq ID 1190 | Seq ID 2336 | | | | |
| Seq ID 045 | Seq ID 1191 | Seq ID 2337 | | | | |
| Seq ID 046 | Seq ID 1192 | Seq ID 2338 | X | | | X |
| Seq ID 047 | Seq ID 1193 | Seq ID 2339 | | | | |
| Seq ID 048 | Seq ID 1194 | Seq ID 2340 | | | | |
| Seq ID 049 | Seq ID 1195 | Seq ID 2341 | | | | |
| Seq ID 050 | Seq ID 1196 | Seq ID 2342 | | | | |
| Seq ID 051 | Seq ID 1197 | Seq ID 2343 | | | | |
| Seq ID 052 | Seq ID 1198 | Seq ID 2344 | X | | | |
| Seq ID 053 | Seq ID 1199 | Seq ID 2345 | | | | |
| Seq ID 054 | Seq ID 1200 | Seq ID 2346 | | | | |
| Seq ID 055 | Seq ID 1201 | Seq ID 2347 | | | | |
| Seq ID 056 | Seq ID 1202 | Seq ID 2348 | | | | |
| Seq ID 057 | Seq ID 1203 | Seq ID 2349 | | | | |
| Seq ID 058 | Seq ID 1204 | Seq ID 2350 | | | | |
| Seq ID 059 | Seq ID 1205 | Seq ID 2351 | | | | |
| Seq ID 060 | Seq ID 1206 | Seq ID 2352 | | | | |
| Seq ID 061 | Seq ID 1207 | Seq ID 2353 | | | | |
| Seq ID 062 | Seq ID 1208 | Seq ID 2354 | | | | X |
| Seq ID 063 | Seq ID 1209 | Seq ID 2355 | | | | |
| Seq ID 064 | Seq ID 1210 | Seq ID 2356 | | | | |
| Seq ID 065 | Seq ID 1211 | Seq ID 2357 | | | | |
| Seq ID 066 | Seq ID 1212 | Seq ID 2358 | | | | |
| Seq ID 067 | Seq ID 1213 | Seq ID 2359 | | | | |
| Seq ID 068 | Seq ID 1214 | Seq ID 2360 | | | | |
| Seq ID 069 | Seq ID 1215 | Seq ID 2361 | | | | |
| Seq ID 070 | Seq ID 1216 | Seq ID 2362 | | | | |
| Seq ID 071 | Seq ID 1217 | Seq ID 2363 | | | | |
| Seq ID 072 | Seq ID 1218 | Seq ID 2364 | X | | | |
| Seq ID 073 | Seq ID 1219 | Seq ID 2365 | | | | |
| Seq ID 074 | Seq ID 1220 | Seq ID 2366 | | | | |
| Seq ID 075 | Seq ID 1221 | Seq ID 2367 | | | | |
| Seq ID 076 | Seq ID 1222 | Seq ID 2368 | | | | |
| Seq ID 077 | Seq ID 1223 | Seq ID 2369 | | | | |
| Seq ID 078 | Seq ID 1224 | Seq ID 2370 | X | | X | |
| Seq ID 079 | Seq ID 1225 | Seq ID 2371 | X | | | |
| Seq ID 080 | Seq ID 1226 | Seq ID 2372 | | | | |
| Seq ID 081 | Seq ID 1227 | Seq ID 2373 | | | | |
| Seq ID 082 | Seq ID 1228 | Seq ID 2374 | | | | |
| Seq ID 083 | Seq ID 1229 | Seq ID 2375 | | | | |
| Seq ID 084 | Seq ID 1230 | Seq ID 2376 | | | | |
| Seq ID 085 | Seq ID 1231 | Seq ID 2377 | | | | |
| Seq ID 086 | Seq ID 1232 | Seq ID 2378 | X | | | |
| Seq ID 087 | Seq ID 1233 | Seq ID 2379 | | | | |
| Seq ID 088 | Seq ID 1234 | Seq ID 2380 | | | | |
| Seq ID 089 | Seq ID 1235 | Seq ID 2381 | | | X | |
| Seq ID 090 | Seq ID 1236 | Seq ID 2382 | | | | |
| Seq ID 091 | Seq ID 1237 | Seq ID 2383 | | | | |
| Seq ID 092 | Seq ID 1238 | Seq ID 2384 | | | | |
| Seq ID 093 | Seq ID 1239 | Seq ID 2385 | | | | |
| Seq ID 094 | Seq ID 1240 | Seq ID 2386 | | | | |
| Seq ID 095 | Seq ID 1241 | Seq ID 2387 | | | | |
| Seq ID 096 | Seq ID 1242 | Seq ID 2388 | | | | |
| Seq ID 097 | Seq ID 1243 | Seq ID 2389 | | | | |
| Seq ID 098 | Seq ID 1244 | Seq ID 2390 | | | | |
| Seq ID 099 | Seq ID 1245 | Seq ID 2391 | | | | |
| Seq ID 100 | Seq ID 1246 | Seq ID 2392 | | | | |
| Seq ID 101 | Seq ID 1247 | Seq ID 2393 | | | | |
| Seq ID 102 | Seq ID 1248 | Seq ID 2394 | | | | |
| Seq ID 103 | Seq ID 1249 | Seq ID 2395 | | | | |
| Seq ID 104 | Seq ID 1250 | Seq ID 2396 | | | | |
| Seq ID 105 | Seq ID 1251 | Seq ID 2397 | | | | |
| Seq ID 106 | Seq ID 1252 | Seq ID 2398 | | | | |
| Seq ID 107 | Seq ID 1253 | Seq ID 2399 | | | | |
| Seq ID 108 | Seq ID 1254 | Seq ID 2400 | | | | |
| Seq ID 109 | Seq ID 1255 | Seq ID 2401 | | | | |
| Seq ID 110 | Seq ID 1256 | Seq ID 2402 | | | | |
| Seq ID 111 | Seq ID 1257 | Seq ID 2403 | | | | |
| Seq ID 112 | Seq ID 1258 | Seq ID 2404 | | | | |
| Seq ID 113 | Seq ID 1259 | Seq ID 2405 | | | | |
| Seq ID 114 | Seq ID 1260 | Seq ID 2406 | | | | |
| Seq ID 115 | Seq ID 1261 | Seq ID 2407 | | | | |
| Seq ID 116 | Seq ID 1262 | Seq ID 2408 | X | | | |
| Seq ID 117 | Seq ID 1263 | Seq ID 2409 | | | | |
| Seq ID 118 | Seq ID 1264 | Seq ID 2410 | | | | |
| Seq ID 119 | Seq ID 1265 | Seq ID 2411 | | | | |
| Seq ID 120 | Seq ID 1266 | Seq ID 2412 | | | | |
| Seq ID 121 | Seq ID 1267 | Seq ID 2413 | | | | |
| Seq ID 122 | Seq ID 1268 | Seq ID 2414 | | | | |
| Seq ID 123 | Seq ID 1269 | Seq ID 2415 | | | | |
| Seq ID 124 | Seq ID 1270 | Seq ID 2416 | | | | |
| Seq ID 125 | Seq ID 1271 | Seq ID 2417 | | | | |
| Seq ID 126 | Seq ID 1272 | Seq ID 2418 | | | | |
| Seq ID 127 | Seq ID 1273 | Seq ID 2419 | | | | |
| Seq ID 128 | Seq ID 1274 | Seq ID 2420 | | | | |
| Seq ID 129 | Seq ID 1275 | Seq ID 2421 | X | | X | |
| Seq ID 130 | Seq ID 1276 | Seq ID 2422 | | | | |
| Seq ID 131 | Seq ID 1277 | Seq ID 2423 | | | | |
| Seq ID 132 | Seq ID 1278 | Seq ID 2424 | | | | |
| Seq ID 133 | Seq ID 1279 | Seq ID 2425 | | | | |
| Seq ID 134 | Seq ID 1280 | Seq ID 2426 | | | | |
| Seq ID 135 | Seq ID 1281 | Seq ID 2427 | | | | |
| Seq ID 136 | Seq ID 1282 | Seq ID 2428 | | | | |
| Seq ID 137 | Seq ID 1283 | Seq ID 2429 | | | | |
| Seq ID 138 | Seq ID 1284 | Seq ID 2430 | | | | |
| Seq ID 139 | Seq ID 1285 | Seq ID 2431 | | | | |
| Seq ID 140 | Seq ID 1286 | Seq ID 2432 | | | | |
| Seq ID 141 | Seq ID 1287 | Seq ID 2433 | | | | |
| Seq ID 142 | Seq ID 1288 | Seq ID 2434 | X | | | |
| Seq ID 143 | Seq ID 1289 | Seq ID 2435 | | | | |
| Seq ID 144 | Seq ID 1290 | Seq ID 2436 | | | | |
| Seq ID 145 | Seq ID 1291 | Seq ID 2437 | | | | |
| Seq ID 146 | Seq ID 1292 | Seq ID 2438 | | | | |
| Seq ID 147 | Seq ID 1293 | Seq ID 2439 | | | | |
| Seq ID 148 | Seq ID 1294 | Seq ID 2440 | | | | |
| Seq ID 149 | Seq ID 1295 | Seq ID 2441 | | | | |
| Seq ID 150 | Seq ID 1296 | Seq ID 2442 | | | | |
| Seq ID 151 | Seq ID 1297 | Seq ID 2443 | | | | |
| Seq ID 152 | Seq ID 1298 | Seq ID 2444 | | | | |
| Seq ID 153 | Seq ID 1299 | Seq ID 2445 | | | | |
| Seq ID 154 | Seq ID 1300 | Seq ID 2446 | | | | |
| Seq ID 155 | Seq ID 1301 | Seq ID 2447 | | | | |
| Seq ID 156 | Seq ID 1302 | Seq ID 2448 | | | | |
| Seq ID 157 | Seq ID 1303 | Seq ID 2449 | | | | |
| Seq ID 158 | Seq ID 1304 | Seq ID 2450 | | | | |
| Seq ID 159 | Seq ID 1305 | Seq ID 2451 | | | | |
| Seq ID 160 | Seq ID 1306 | Seq ID 2452 | X | | | |
| Seq ID 161 | Seq ID 1307 | Seq ID 2453 | | | | |
| Seq ID 162 | Seq ID 1308 | Seq ID 2454 | | | | |
| Seq ID 163 | Seq ID 1309 | Seq ID 2455 | | | | |
| Seq ID 164 | Seq ID 1310 | Seq ID 2456 | | | | |
| Seq ID 165 | Seq ID 1311 | Seq ID 2457 | | | | |
| Seq ID 166 | Seq ID 1312 | Seq ID 2458 | | | | |
| Seq ID 167 | Seq ID 1313 | Seq ID 2459 | | | | |
| Seq ID 168 | Seq ID 1314 | Seq ID 2460 | | | | |
| Seq ID 169 | Seq ID 1315 | Seq ID 2461 | | | | |
| Seq ID 170 | Seq ID 1316 | Seq ID 2462 | | | | |
| Seq ID 171 | Seq ID 1317 | Seq ID 2463 | | | | |
| Seq ID 172 | Seq ID 1318 | Seq ID 2464 | | | | |
| Seq ID 173 | Seq ID 1319 | Seq ID 2465 | | | | |
| Seq ID 174 | Seq ID 1320 | Seq ID 2466 | X | | | |
| Seq ID 175 | Seq ID 1321 | Seq ID 2467 | | | | |
| Seq ID 176 | Seq ID 1322 | Seq ID 2468 | | | | |
| Seq ID 177 | Seq ID 1323 | Seq ID 2469 | | | | |
| Seq ID 178 | Seq ID 1324 | Seq ID 2470 | X | | | |
| Seq ID 179 | Seq ID 1325 | Seq ID 2471 | | | | |
| Seq ID 180 | Seq ID 1326 | Seq ID 2472 | | | | |
| Seq ID 181 | Seq ID 1327 | Seq ID 2473 | | | | |
| Seq ID 182 | Seq ID 1328 | Seq ID 2474 | | | | |
| Seq ID 183 | Seq ID 1329 | Seq ID 2475 | | | | |
| Seq ID 184 | Seq ID 1330 | Seq ID 2476 | | | | |
| Seq ID 185 | Seq ID 1331 | Seq ID 2477 | | | | |
| Seq ID 186 | Seq ID 1332 | Seq ID 2478 | | | | |
| Seq ID 187 | Seq ID 1333 | Seq ID 2479 | | | | |
| Seq ID 188 | Seq ID 1334 | Seq ID 2480 | | | | |
| Seq ID 189 | Seq ID 1335 | Seq ID 2481 | | | | |
| Seq ID 190 | Seq ID 1336 | Seq ID 2482 | | | | |
| Seq ID 191 | Seq ID 1337 | Seq ID 2483 | | | | |
| Seq ID 192 | Seq ID 1338 | Seq ID 2484 | | | | |
| Seq ID 193 | Seq ID 1339 | Seq ID 2485 | | | | |
| Seq ID 194 | Seq ID 1340 | Seq ID 2486 | | | | |
| Seq ID 195 | Seq ID 1341 | Seq ID 2487 | | | | |
| Seq ID 196 | Seq ID 1342 | Seq ID 2488 | | | | |
| Seq ID 197 | Seq ID 1343 | Seq ID 2489 | | | | |
| Seq ID 198 | Seq ID 1344 | Seq ID 2490 | X | | | X |
| Seq ID 199 | Seq ID 1345 | Seq ID 2491 | | | | |
| Seq ID 200 | Seq ID 1346 | Seq ID 2492 | | | | |
| Seq ID 201 | Seq ID 1347 | Seq ID 2493 | | | | |
| Seq ID 202 | Seq ID 1348 | Seq ID 2494 | | | | |
| Seq ID 203 | Seq ID 1349 | Seq ID 2495 | X | | | |
| Seq ID 204 | Seq ID 1350 | Seq ID 2496 | | | | |
| Seq ID 205 | Seq ID 1351 | Seq ID 2497 | | | | |
| Seq ID 206 | Seq ID 1352 | Seq ID 2498 | | | | |
| Seq ID 207 | Seq ID 1353 | Seq ID 2499 | | | | |
| Seq ID 208 | Seq ID 1354 | Seq ID 2500 | | | | |
| Seq ID 209 | Seq ID 1355 | Seq ID 2501 | | | | |
| Seq ID 210 | Seq ID 1356 | Seq ID 2502 | | | | |
| Seq ID 211 | Seq ID 1357 | Seq ID 2503 | | | | |
| Seq ID 212 | Seq ID 1358 | Seq ID 2504 | X | | | |
| Seq ID 213 | Seq ID 1359 | Seq ID 2505 | | | | |
| Seq ID 214 | Seq ID 1360 | Seq ID 2506 | | | | |
| Seq ID 215 | Seq ID 1361 | Seq ID 2507 | | | | |
| Seq ID 216 | Seq ID 1362 | Seq ID 2508 | | | | |
| Seq ID 217 | Seq ID 1363 | Seq ID 2509 | | | | |
| Seq ID 218 | Seq ID 1364 | Seq ID 2510 | | | | |
| Seq ID 219 | Seq ID 1365 | Seq ID 2511 | | | | |
| Seq ID 220 | Seq ID 1366 | Seq ID 2512 | | | | |
| Seq ID 221 | Seq ID 1367 | Seq ID 2513 | | | | |
| Seq ID 222 | Seq ID 1368 | Seq ID 2514 | | | | |
| Seq ID 223 | Seq ID 1369 | Seq ID 2515 | | | | |
| Seq ID 224 | Seq ID 1370 | Seq ID 2516 | | | | |
| Seq ID 225 | Seq ID 1371 | Seq ID 2517 | | | | |
| Seq ID 226 | Seq ID 1372 | Seq ID 2518 | | | | |
| Seq ID 227 | Seq ID 1373 | Seq ID 2519 | | | | |
| Seq ID 228 | Seq ID 1374 | Seq ID 2520 | | | | |
| Seq ID 229 | Seq ID 1375 | Seq ID 2521 | | | | |
| Seq ID 230 | Seq ID 1376 | Seq ID 2522 | | | | |
| Seq ID 231 | Seq ID 1377 | Seq ID 2523 | | | | |
| Seq ID 232 | Seq ID 1378 | Seq ID 2524 | | | | |
| Seq ID 233 | Seq ID 1379 | Seq ID 2525 | | | | |
| Seq ID 234 | Seq ID 1380 | Seq ID 2526 | | | | |
| Seq ID 235 | Seq ID 1381 | Seq ID 2527 | X | | | |
| Seq ID 236 | Seq ID 1382 | Seq ID 2528 | | | | |
| Seq ID 237 | Seq ID 1383 | Seq ID 2529 | | | | |
| Seq ID 238 | Seq ID 1384 | Seq ID 2530 | | | | |
| Seq ID 239 | Seq ID 1385 | Seq ID 2531 | | | | |
| Seq ID 240 | Seq ID 1386 | Seq ID 2532 | | | | |
| Seq ID 241 | Seq ID 1387 | Seq ID 2533 | | | | |
| Seq ID 242 | Seq ID 1388 | Seq ID 2534 | | | | |
| Seq ID 243 | Seq ID 1389 | Seq ID 2535 | | | | |
| Seq ID 244 | Seq ID 1390 | Seq ID 2536 | | | | |
| Seq ID 245 | Seq ID 1391 | Seq ID 2537 | | | | |
| Seq ID 246 | Seq ID 1392 | Seq ID 2538 | | | | |
| Seq ID 247 | Seq ID 1393 | Seq ID 2539 | | | | |
| Seq ID 248 | Seq ID 1394 | Seq ID 2540 | | | | |
| Seq ID 249 | Seq ID 1395 | Seq ID 2541 | | | | |
| Seq ID 250 | Seq ID 1396 | Seq ID 2542 | | | | |
| Seq ID 251 | Seq ID 1397 | Seq ID 2543 | | | | |
| Seq ID 252 | Seq ID 1398 | Seq ID 2544 | | | | |
| Seq ID 253 | Seq ID 1399 | Seq ID 2545 | | | | |
| Seq ID 254 | Seq ID 1400 | Seq ID 2546 | | | | |
| Seq ID 255 | Seq ID 1401 | Seq ID 2547 | | | | |
| Seq ID 256 | Seq ID 1402 | Seq ID 2548 | | | | |
| Seq ID 257 | Seq ID 1403 | Seq ID 2549 | | | | |
| Seq ID 258 | Seq ID 1404 | Seq ID 2550 | | | | |
| Seq ID 259 | Seq ID 1405 | Seq ID 2551 | | | | |
| Seq ID 260 | Seq ID 1406 | Seq ID 2552 | | | | |
| Seq ID 261 | Seq ID 1407 | Seq ID 2553 | | | | |
| Seq ID 262 | Seq ID 1408 | Seq ID 2554 | | | | |
| Seq ID 263 | Seq ID 1409 | Seq ID 2555 | | | | |
| Seq ID 264 | Seq ID 1410 | Seq ID 2556 | | | | |
| Seq ID 265 | Seq ID 1411 | Seq ID 2557 | | | | |
| Seq ID 266 | Seq ID 1412 | Seq ID 2558 | | | | |
| Seq ID 267 | Seq ID 1413 | Seq ID 2559 | | | | |
| Seq ID 268 | Seq ID 1414 | Seq ID 2560 | | | | |
| Seq ID 269 | Seq ID 1415 | Seq ID 2561 | X | | | |
| Seq ID 270 | Seq ID 1416 | Seq ID 2562 | X | | | X |
| Seq ID 271 | Seq ID 1417 | Seq ID 2563 | | | | |
| Seq ID 272 | Seq ID 1418 | Seq ID 2564 | | | | |
| Seq ID 273 | Seq ID 1419 | Seq ID 2565 | | | | |
| Seq ID 274 | Seq ID 1420 | Seq ID 2566 | X | | | |
| Seq ID 275 | Seq ID 1421 | Seq ID 2567 | | | | |
| Seq ID 276 | Seq ID 1422 | Seq ID 2568 | | | | |
| Seq ID 277 | Seq ID 1423 | Seq ID 2569 | | | | |
| Seq ID 278 | Seq ID 1424 | Seq ID 2570 | | | | |
| Seq ID 279 | Seq ID 1425 | Seq ID 2571 | | | | |
| Seq ID 280 | Seq ID 1426 | Seq ID 2572 | | | | |
| Seq ID 281 | Seq ID 1427 | Seq ID 2573 | | | | |
| Seq ID 282 | Seq ID 1428 | Seq ID 2574 | X | | | X |
| Seq ID 283 | Seq ID 1429 | Seq ID 2575 | | | | |
| Seq ID 284 | Seq ID 1430 | Seq ID 2576 | | | | |
| Seq ID 285 | Seq ID 1431 | Seq ID 2577 | | | | |
| Seq ID 286 | Seq ID 1432 | Seq ID 2578 | X | | | |
| Seq ID 287 | Seq ID 1433 | Seq ID 2579 | | | | |
| Seq ID 288 | Seq ID 1434 | Seq ID 2580 | X | | | |
| Seq ID 289 | Seq ID 1435 | Seq ID 2581 | | | | |
| Seq ID 290 | Seq ID 1436 | Seq ID 2582 | | | | |
| Seq ID 291 | Seq ID 1437 | Seq ID 2583 | | | | |
| Seq ID 292 | Seq ID 1438 | Seq ID 2584 | X | | X | |
| Seq ID 293 | Seq ID 1439 | Seq ID 2585 | | | | |
| Seq ID 294 | Seq ID 1440 | Seq ID 2586 | | | | |
| Seq ID 295 | Seq ID 1441 | Seq ID 2587 | | | | |
| Seq ID 296 | Seq ID 1442 | Seq ID 2588 | | | | |
| Seq ID 297 | Seq ID 1443 | Seq ID 2589 | | | | |
| Seq ID 298 | Seq ID 1444 | Seq ID 2590 | | | | |
| Seq ID 299 | Seq ID 1445 | Seq ID 2591 | | | | |
| Seq ID 300 | Seq ID 1446 | Seq ID 2592 | | | | |
| Seq ID 301 | Seq ID 1447 | Seq ID 2593 | | | | |
| Seq ID 302 | Seq ID 1448 | Seq ID 2594 | | | | |
| Seq ID 303 | Seq ID 1449 | Seq ID 2595 | | | | |
| Seq ID 304 | Seq ID 1450 | Seq ID 2596 | | | | |
| Seq ID 305 | Seq ID 1451 | Seq ID 2597 | X | | | |
| Seq ID 306 | Seq ID 1452 | Seq ID 2598 | | | | |
| Seq ID 307 | Seq ID 1453 | Seq ID 2599 | | | | |
| Seq ID 308 | Seq ID 1454 | Seq ID 2600 | | | | |
| Seq ID 309 | Seq ID 1455 | Seq ID 2601 | | | | |
| Seq ID 310 | Seq ID 1456 | Seq ID 2602 | | X | | |
| Seq ID 311 | Seq ID 1457 | Seq ID 2603 | | | | X |
| Seq ID 312 | Seq ID 1458 | Seq ID 2604 | X | | | |
| Seq ID 313 | Seq ID 1459 | Seq ID 2605 | | | | |
| Seq ID 314 | Seq ID 1460 | Seq ID 2606 | | | | |
| Seq ID 315 | Seq ID 1461 | Seq ID 2607 | | | | |
| Seq ID 316 | Seq ID 1462 | Seq ID 2608 | X | | | |
| Seq ID 317 | Seq ID 1463 | Seq ID 2609 | | | | |
| Seq ID 318 | Seq ID 1464 | Seq ID 2610 | | | | |
| Seq ID 319 | Seq ID 1465 | Seq ID 2611 | | | | |
| Seq ID 320 | Seq ID 1466 | Seq ID 2612 | | | | |
| Seq ID 321 | Seq ID 1467 | Seq ID 2613 | | | | |
| Seq ID 322 | Seq ID 1468 | Seq ID 2614 | | | | |
| Seq ID 323 | Seq ID 1469 | Seq ID 2615 | | | | |
| Seq ID 324 | Seq ID 1470 | Seq ID 2616 | | | | |
| Seq ID 325 | Seq ID 1471 | Seq ID 2617 | | | | |
| Seq ID 326 | Seq ID 1472 | Seq ID 2618 | | | | |
| Seq ID 327 | Seq ID 1473 | Seq ID 2619 | | | | |
| Seq ID 328 | Seq ID 1474 | Seq ID 2620 | | | | |
| Seq ID 329 | Seq ID 1475 | Seq ID 2621 | | | | |
| Seq ID 330 | Seq ID 1476 | Seq ID 2622 | | | | |
| Seq ID 331 | Seq ID 1477 | Seq ID 2623 | | | | |
| Seq ID 332 | Seq ID 1478 | Seq ID 2624 | | | | |
| Seq ID 333 | Seq ID 1479 | Seq ID 2625 | | | | |
| Seq ID 334 | Seq ID 1480 | Seq ID 2626 | | | | |
| Seq ID 335 | Seq ID 1481 | Seq ID 2627 | | | | |
| Seq ID 336 | Seq ID 1482 | Seq ID 2628 | | | | |
| Seq ID 337 | Seq ID 1483 | Seq ID 2629 | | | | |
| Seq ID 338 | Seq ID 1484 | Seq ID 2630 | | | | |
| Seq ID 339 | Seq ID 1485 | Seq ID 2631 | | | | |
| Seq ID 340 | Seq ID 1486 | Seq ID 2632 | | | | |
| Seq ID 341 | Seq ID 1487 | Seq ID 2633 | | | | |
| Seq ID 342 | Seq ID 1488 | Seq ID 2634 | | | | |
| Seq ID 343 | Seq ID 1489 | Seq ID 2635 | | | | |
| Seq ID 344 | Seq ID 1490 | Seq ID 2636 | | | | |
| Seq ID 345 | Seq ID 1491 | Seq ID 2637 | | | | |
| Seq ID 346 | Seq ID 1492 | Seq ID 2638 | | | | |
| Seq ID 347 | Seq ID 1493 | Seq ID 2639 | X | | | |
| Seq ID 348 | Seq ID 1494 | Seq ID 2640 | X | | | |
| Seq ID 349 | Seq ID 1495 | Seq ID 2641 | | | | |
| Seq ID 350 | Seq ID 1496 | Seq ID 2642 | | | | |
| Seq ID 351 | Seq ID 1497 | Seq ID 2643 | | | | |
| Seq ID 352 | Seq ID 1498 | Seq ID 2644 | | | | |
| Seq ID 353 | Seq ID 1499 | Seq ID 2645 | | | | |
| Seq ID 354 | Seq ID 1500 | Seq ID 2646 | X | | | |
| Seq ID 355 | Seq ID 1501 | Seq ID 2647 | X | | | X |
| Seq ID 356 | Seq ID 1502 | Seq ID 2648 | | | | |
| Seq ID 357 | Seq ID 1503 | Seq ID 2649 | X | | | |
| Seq ID 358 | Seq ID 1504 | Seq ID 2650 | | | | |
| Seq ID 359 | Seq ID 1505 | Seq ID 2651 | | | | |
| Seq ID 360 | Seq ID 1506 | Seq ID 2652 | X | | | X |
| Seq ID 361 | Seq ID 1507 | Seq ID 2653 | | | | |
| Seq ID 362 | Seq ID 1508 | Seq ID 2654 | | | | |
| Seq ID 363 | Seq ID 1509 | Seq ID 2655 | | | | |
| Seq ID 364 | Seq ID 1510 | Seq ID 2656 | | | | |
| Seq ID 365 | Seq ID 1511 | Seq ID 2657 | | | | |
| Seq ID 366 | Seq ID 1512 | Seq ID 2658 | | | | |
| Seq ID 367 | Seq ID 1513 | Seq ID 2659 | | | | |
| Seq ID 368 | Seq ID 1514 | Seq ID 2660 | | X | | |
| Seq ID 369 | Seq ID 1515 | Seq ID 2661 | | | | |
| Seq ID 370 | Seq ID 1516 | Seq ID 2662 | | | | |
| Seq ID 371 | Seq ID 1517 | Seq ID 2663 | X | X | | |
| Seq ID 372 | Seq ID 1518 | Seq ID 2664 | X | | | |
| Seq ID 373 | Seq ID 1519 | Seq ID 2665 | | | | |
| Seq ID 374 | Seq ID 1520 | Seq ID 2666 | | | | |
| Seq ID 375 | Seq ID 1521 | Seq ID 2667 | | | | |
| Seq ID 376 | Seq ID 1522 | Seq ID 2668 | | | | |
| Seq ID 377 | Seq ID 1523 | Seq ID 2669 | | | | |
| Seq ID 378 | Seq ID 1524 | Seq ID 2670 | | | | |
| Seq ID 379 | Seq ID 1525 | Seq ID 2671 | | | | |
| Seq ID 380 | Seq ID 1526 | Seq ID 2672 | | | | |
| Seq ID 381 | Seq ID 1527 | Seq ID 2673 | | | | |
| Seq ID 382 | Seq ID 1528 | Seq ID 2674 | | | | |
| Seq ID 383 | Seq ID 1529 | Seq ID 2675 | | | | |
| Seq ID 384 | Seq ID 1530 | Seq ID 2676 | | | | |
| Seq ID 385 | Seq ID 1531 | Seq ID 2677 | | | | |
| Seq ID 386 | Seq ID 1532 | Seq ID 2678 | | | | |
| Seq ID 387 | Seq ID 1533 | Seq ID 2679 | | | | |
| Seq ID 388 | Seq ID 1534 | Seq ID 2680 | | | | |
| Seq ID 389 | Seq ID 1535 | Seq ID 2681 | | | | |
| Seq ID 390 | Seq ID 1536 | Seq ID 2682 | | | | |
| Seq ID 391 | Seq ID 1537 | Seq ID 2683 | | | | |
| Seq ID 392 | Seq ID 1538 | Seq ID 2684 | | | | |
| Seq ID 393 | Seq ID 1539 | Seq ID 2685 | | | | |
| Seq ID 394 | Seq ID 1540 | Seq ID 2686 | | | | |
| Seq ID 395 | Seq ID 1541 | Seq ID 2687 | | | | |
| Seq ID 396 | Seq ID 1542 | Seq ID 2688 | | | | |
| Seq ID 397 | Seq ID 1543 | Seq ID 2689 | | | | |
| Seq ID 398 | Seq ID 1544 | Seq ID 2690 | | | | |
| Seq ID 399 | Seq ID 1545 | Seq ID 2691 | | | | |
| Seq ID 400 | Seq ID 1546 | Seq ID 2692 | | | | |
| Seq ID 401 | Seq ID 1547 | Seq ID 2693 | | | | |
| Seq ID 402 | Seq ID 1548 | Seq ID 2694 | | | | |
| Seq ID 403 | Seq ID 1549 | Seq ID 2695 | | | | |
| Seq ID 404 | Seq ID 1550 | Seq ID 2696 | X | | | |
| Seq ID 405 | Seq ID 1551 | Seq ID 2697 | | | | |
| Seq ID 406 | Seq ID 1552 | Seq ID 2698 | | | | |
| Seq ID 407 | Seq ID 1553 | Seq ID 2699 | | | | |
| Seq ID 408 | Seq ID 1554 | Seq ID 2700 | | | | |
| Seq ID 409 | Seq ID 1555 | Seq ID 2701 | | | | |
| Seq ID 410 | Seq ID 1556 | Seq ID 2702 | | | | |
| Seq ID 411 | Seq ID 1557 | Seq ID 2703 | | | | |
| Seq ID 412 | Seq ID 1558 | Seq ID 2704 | | | | |
| Seq ID 413 | Seq ID 1559 | Seq ID 2705 | | | | |
| Seq ID 414 | Seq ID 1560 | Seq ID 2706 | | | | |
| Seq ID 415 | Seq ID 1561 | Seq ID 2707 | | | | |
| Seq ID 416 | Seq ID 1562 | Seq ID 2708 | | | | |
| Seq ID 417 | Seq ID 1563 | Seq ID 2709 | | | | |
| Seq ID 418 | Seq ID 1564 | Seq ID 2710 | | | | |
| Seq ID 419 | Seq ID 1565 | Seq ID 2711 | | | | |
| Seq ID 420 | Seq ID 1566 | Seq ID 2712 | | | | |
| Seq ID 421 | Seq ID 1567 | Seq ID 2713 | | | | |
| Seq ID 422 | Seq ID 1568 | Seq ID 2714 | | | | |
| Seq ID 423 | Seq ID 1569 | Seq ID 2715 | | | | |
| Seq ID 424 | Seq ID 1570 | Seq ID 2716 | | | | |
| Seq ID 425 | Seq ID 1571 | Seq ID 2717 | | | | |
| Seq ID 426 | Seq ID 1572 | Seq ID 2718 | | | | |
| Seq ID 427 | Seq ID 1573 | Seq ID 2719 | | | | |
| Seq ID 428 | Seq ID 1574 | Seq ID 2720 | | | | |
| Seq ID 429 | Seq ID 1575 | Seq ID 2721 | | | | |
| Seq ID 430 | Seq ID 1576 | Seq ID 2722 | | | | |
| Seq ID 431 | Seq ID 1577 | Seq ID 2723 | | | | |
| Seq ID 432 | Seq ID 1578 | Seq ID 2724 | | | | |
| Seq ID 433 | Seq ID 1579 | Seq ID 2725 | X | | | |
| Seq ID 434 | Seq ID 1580 | Seq ID 2726 | | | | |
| Seq ID 435 | Seq ID 1581 | Seq ID 2727 | X | | | |
| Seq ID 436 | Seq ID 1582 | Seq ID 2728 | | | | |
| Seq ID 437 | Seq ID 1583 | Seq ID 2729 | X | | | |
| Seq ID 438 | Seq ID 1584 | Seq ID 2730 | | | | |
| Seq ID 439 | Seq ID 1585 | Seq ID 2731 | | | | |
| Seq ID 440 | Seq ID 1586 | Seq ID 2732 | | | | |
| Seq ID 441 | Seq ID 1587 | Seq ID 2733 | | | | |
| Seq ID 442 | Seq ID 1588 | Seq ID 2734 | | | | |
| Seq ID 443 | Seq ID 1589 | Seq ID 2735 | | | | |
| Seq ID 444 | Seq ID 1590 | Seq ID 2736 | | X | | |
| Seq ID 445 | Seq ID 1591 | Seq ID 2737 | | | | |
| Seq ID 446 | Seq ID 1592 | Seq ID 2738 | | | | |
| Seq ID 447 | Seq ID 1593 | Seq ID 2739 | | | | |
| Seq ID 448 | Seq ID 1594 | Seq ID 2740 | | | | |
| Seq ID 449 | Seq ID 1595 | Seq ID 2741 | | | | |
| Seq ID 450 | Seq ID 1596 | Seq ID 2742 | | | | |
| Seq ID 451 | Seq ID 1597 | Seq ID 2743 | | | | |
| Seq ID 452 | Seq ID 1598 | Seq ID 2744 | | | | |
| Seq ID 453 | Seq ID 1599 | Seq ID 2745 | | | | |
| Seq ID 454 | Seq ID 1600 | Seq ID 2746 | | | | |
| Seq ID 455 | Seq ID 1601 | Seq ID 2747 | | | | |
| Seq ID 456 | Seq ID 1602 | Seq ID 2748 | | | | |
| Seq ID 457 | Seq ID 1603 | Seq ID 2749 | | | | |
| Seq ID 458 | Seq ID 1604 | Seq ID 2750 | | | | |
| Seq ID 459 | Seq ID 1605 | Seq ID 2751 | | | | |
| Seq ID 460 | Seq ID 1606 | Seq ID 2752 | | | | |
| Seq ID 461 | Seq ID 1607 | Seq ID 2753 | | | | |
| Seq ID 462 | Seq ID 1608 | Seq ID 2754 | | | | |
| Seq ID 463 | Seq ID 1609 | Seq ID 2755 | X | | | |
| Seq ID 464 | Seq ID 1610 | Seq ID 2756 | | | | |
| Seq ID 465 | Seq ID 1611 | Seq ID 2757 | | | | |
| Seq ID 466 | Seq ID 1612 | Seq ID 2758 | | | | |
| Seq ID 467 | Seq ID 1613 | Seq ID 2759 | | | | |
| Seq ID 468 | Seq ID 1614 | Seq ID 2760 | | | | |
| Seq ID 469 | Seq ID 1615 | Seq ID 2761 | X | | | |
| Seq ID 470 | Seq ID 1616 | Seq ID 2762 | | | | |
| Seq ID 471 | Seq ID 1617 | Seq ID 2763 | X | | | |
| Seq ID 472 | Seq ID 1618 | Seq ID 2764 | | | | |
| Seq ID 473 | Seq ID 1619 | Seq ID 2765 | | | | |
| Seq ID 474 | Seq ID 1620 | Seq ID 2766 | | | | |
| Seq ID 475 | Seq ID 1621 | Seq ID 2767 | | | | |
| Seq ID 476 | Seq ID 1622 | Seq ID 2768 | | | | |
| Seq ID 477 | Seq ID 1623 | Seq ID 2769 | X | | | |
| Seq ID 478 | Seq ID 1624 | Seq ID 2770 | | | | |
| Seq ID 479 | Seq ID 1625 | Seq ID 2771 | X | | | |
| Seq ID 480 | Seq ID 1626 | Seq ID 2772 | | | | |
| Seq ID 481 | Seq ID 1627 | Seq ID 2773 | | | | |
| Seq ID 482 | Seq ID 1628 | Seq ID 2774 | | | | |
| Seq ID 483 | Seq ID 1629 | Seq ID 2775 | | | | |
| Seq ID 484 | Seq ID 1630 | Seq ID 2776 | | | | |
| Seq ID 485 | Seq ID 1631 | Seq ID 2777 | | | | |
| Seq ID 486 | Seq ID 1632 | Seq ID 2778 | X | | | X |
| Seq ID 487 | Seq ID 1633 | Seq ID 2779 | | | | |
| Seq ID 488 | Seq ID 1634 | Seq ID 2780 | | | | |
| Seq ID 489 | Seq ID 1635 | Seq ID 2781 | | | | |
| Seq ID 490 | Seq ID 1636 | Seq ID 2782 | | | | |
| Seq ID 491 | Seq ID 1637 | Seq ID 2783 | | | | |
| Seq ID 492 | Seq ID 1638 | Seq ID 2784 | | | | |
| Seq ID 493 | Seq ID 1639 | Seq ID 2785 | | | | |
| Seq ID 494 | Seq ID 1640 | Seq ID 2786 | | | | |
| Seq ID 495 | Seq ID 1641 | Seq ID 2787 | | | | |
| Seq ID 496 | Seq ID 1642 | Seq ID 2788 | | | | |
| Seq ID 497 | Seq ID 1643 | Seq ID 2789 | | | | |
| Seq ID 498 | Seq ID 1644 | Seq ID 2790 | | | | |
| Seq ID 499 | Seq ID 1645 | Seq ID 2791 | | | | |
| Seq ID 500 | Seq ID 1646 | Seq ID 2792 | X | | | X |
| Seq ID 501 | Seq ID 1647 | Seq ID 2793 | | | | |
| Seq ID 502 | Seq ID 1648 | Seq ID 2794 | | | | |
| Seq ID 503 | Seq ID 1649 | Seq ID 2795 | | | | |
| Seq ID 504 | Seq ID 1650 | Seq ID 2796 | | | | |
| Seq ID 505 | Seq ID 1651 | Seq ID 2797 | | | | |
| Seq ID 506 | Seq ID 1652 | Seq ID 2798 | | | | |
| Seq ID 507 | Seq ID 1653 | Seq ID 2799 | X | | | X |
| Seq ID 508 | Seq ID 1654 | Seq ID 2800 | | | | |
| Seq ID 509 | Seq ID 1655 | Seq ID 2801 | X | | | X |
| Seq ID 510 | Seq ID 1656 | Seq ID 2802 | | | | |
| Seq ID 511 | Seq ID 1657 | Seq ID 2803 | | | | |
| Seq ID 512 | Seq ID 1658 | Seq ID 2804 | | | | |
| Seq ID 513 | Seq ID 1659 | Seq ID 2805 | | | | |
| Seq ID 514 | Seq ID 1660 | Seq ID 2806 | | | | |
| Seq ID 515 | Seq ID 1661 | Seq ID 2807 | | | | |
| Seq ID 516 | Seq ID 1662 | Seq ID 2808 | | | | |
| Seq ID 517 | Seq ID 1663 | Seq ID 2809 | | | | |
| Seq ID 518 | Seq ID 1664 | Seq ID 2810 | | | | |
| Seq ID 519 | Seq ID 1665 | Seq ID 2811 | | | | |
| Seq ID 520 | Seq ID 1666 | Seq ID 2812 | | | | |
| Seq ID 521 | Seq ID 1667 | Seq ID 2813 | | | | |
| Seq ID 522 | Seq ID 1668 | Seq ID 2814 | | | | |
| Seq ID 523 | Seq ID 1669 | Seq ID 2815 | | | | |
| Seq ID 524 | Seq ID 1670 | Seq ID 2816 | | | | |
| Seq ID 525 | Seq ID 1671 | Seq ID 2817 | X | | | |
| Seq ID 526 | Seq ID 1672 | Seq ID 2818 | | | | |
| Seq ID 527 | Seq ID 1673 | Seq ID 2819 | | | | |
| Seq ID 528 | Seq ID 1674 | Seq ID 2820 | | | | |
| Seq ID 529 | Seq ID 1675 | Seq ID 2821 | | | | |
| Seq ID 530 | Seq ID 1676 | Seq ID 2822 | | | | |
| Seq ID 531 | Seq ID 1677 | Seq ID 2823 | | | | |
| Seq ID 532 | Seq ID 1678 | Seq ID 2824 | | | | |
| Seq ID 533 | Seq ID 1679 | Seq ID 2825 | | | | |
| Seq ID 534 | Seq ID 1680 | Seq ID 2826 | X | | | |
| Seq ID 535 | Seq ID 1681 | Seq ID 2827 | | | | |
| Seq ID 536 | Seq ID 1682 | Seq ID 2828 | | | | |
| Seq ID 537 | Seq ID 1683 | Seq ID 2829 | | | | |
| Seq ID 538 | Seq ID 1684 | Seq ID 2830 | | | | |
| Seq ID 539 | Seq ID 1685 | Seq ID 2831 | | | | |
| Seq ID 540 | Seq ID 1686 | Seq ID 2832 | | | | |
| Seq ID 541 | Seq ID 1687 | Seq ID 2833 | | | | |
| Seq ID 542 | Seq ID 1688 | Seq ID 2834 | | | | |
| Seq ID 543 | Seq ID 1689 | Seq ID 2835 | X | | | |
| Seq ID 544 | Seq ID 1690 | Seq ID 2836 | | | | |
| Seq ID 545 | Seq ID 1691 | Seq ID 2837 | | | | |
| Seq ID 546 | Seq ID 1692 | Seq ID 2838 | | | | |
| Seq ID 547 | Seq ID 1693 | Seq ID 2839 | | | | |
| Seq ID 548 | Seq ID 1694 | Seq ID 2840 | | | | |
| Seq ID 549 | Seq ID 1695 | Seq ID 2841 | | | | |
| Seq ID 550 | Seq ID 1696 | Seq ID 2842 | | | | |
| Seq ID 551 | Seq ID 1697 | Seq ID 2843 | | | | |
| Seq ID 552 | Seq ID 1698 | Seq ID 2844 | | | | |
| Seq ID 553 | Seq ID 1699 | Seq ID 2845 | X | | | |
| Seq ID 554 | Seq ID 1700 | Seq ID 2846 | | | | |
| Seq ID 555 | Seq ID 1701 | Seq ID 2847 | | | | |
| Seq ID 556 | Seq ID 1702 | Seq ID 2848 | | | | |
| Seq ID 557 | Seq ID 1703 | Seq ID 2849 | | | | |
| Seq ID 558 | Seq ID 1704 | Seq ID 2850 | | | | |
| Seq ID 559 | Seq ID 1705 | Seq ID 2851 | | | X | X |
| Seq ID 560 | Seq ID 1706 | Seq ID 2852 | | | | |
| Seq ID 561 | Seq ID 1707 | Seq ID 2853 | | | | |
| Seq ID 562 | Seq ID 1708 | Seq ID 2854 | X | | | |
| Seq ID 563 | Seq ID 1709 | Seq ID 2855 | | | | |
| Seq ID 564 | Seq ID 1710 | Seq ID 2856 | | | | |
| Seq ID 565 | Seq ID 1711 | Seq ID 2857 | X | | | |
| Seq ID 566 | Seq ID 1712 | Seq ID 2858 | | | | |
| Seq ID 567 | Seq ID 1713 | Seq ID 2859 | | | | |
| Seq ID 568 | Seq ID 1714 | Seq ID 2860 | | | | |
| Seq ID 569 | Seq ID 1715 | Seq ID 2861 | | | | |
| Seq ID 570 | Seq ID 1716 | Seq ID 2862 | | | | |
| Seq ID 571 | Seq ID 1717 | Seq ID 2863 | | | | |
| Seq ID 572 | Seq ID 1718 | Seq ID 2864 | | | | |
| Seq ID 573 | Seq ID 1719 | Seq ID 2865 | | | | |
| Seq ID 574 | Seq ID 1720 | Seq ID 2866 | | | | |
| Seq ID 575 | Seq ID 1721 | Seq ID 2867 | | | | |
| Seq ID 576 | Seq ID 1722 | Seq ID 2868 | | | | |
| Seq ID 577 | Seq ID 1723 | Seq ID 2869 | | | | |
| Seq ID 578 | Seq ID 1724 | Seq ID 2870 | | | | |
| Seq ID 579 | Seq ID 1725 | Seq ID 2871 | | | | |
| Seq ID 580 | Seq ID 1726 | Seq ID 2872 | | | | |
| Seq ID 581 | Seq ID 1727 | Seq ID 2873 | | | | X |
| Seq ID 582 | Seq ID 1728 | Seq ID 2874 | | | | |
| Seq ID 583 | Seq ID 1729 | Seq ID 2875 | | | | |
| Seq ID 584 | Seq ID 1730 | Seq ID 2876 | | | | |
| Seq ID 585 | Seq ID 1731 | Seq ID 2877 | | | | |
| Seq ID 586 | Seq ID 1732 | Seq ID 2878 | X | | | |
| Seq ID 587 | Seq ID 1733 | Seq ID 2879 | | | | |
| Seq ID 588 | Seq ID 1734 | Seq ID 2880 | | | | |
| Seq ID 589 | Seq ID 1735 | Seq ID 2881 | | | | |
| Seq ID 590 | Seq ID 1736 | Seq ID 2882 | | | | |
| Seq ID 591 | Seq ID 1737 | Seq ID 2883 | | | | |
| Seq ID 592 | Seq ID 1738 | Seq ID 2884 | X | | | X |
| Seq ID 593 | Seq ID 1739 | Seq ID 2885 | | | | |
| Seq ID 594 | Seq ID 1740 | Seq ID 2886 | | | | |
| Seq ID 595 | Seq ID 1741 | Seq ID 2887 | | | | |
| Seq ID 596 | Seq ID 1742 | Seq ID 2888 | | | | |
| Seq ID 597 | Seq ID 1743 | Seq ID 2889 | | | | |
| Seq ID 598 | Seq ID 1744 | Seq ID 2890 | | | | |
| Seq ID 599 | Seq ID 1745 | Seq ID 2891 | | | | |
| Seq ID 600 | Seq ID 1746 | Seq ID 2892 | | | | |
| Seq ID 601 | Seq ID 1747 | Seq ID 2893 | | | | |
| Seq ID 602 | Seq ID 1748 | Seq ID 2894 | | | | |
| Seq ID 603 | Seq ID 1749 | Seq ID 2895 | | | | |
| Seq ID 604 | Seq ID 1750 | Seq ID 2896 | | | | |
| Seq ID 605 | Seq ID 1751 | Seq ID 2897 | | | | |
| Seq ID 606 | Seq ID 1752 | Seq ID 2898 | | | | |
| Seq ID 607 | Seq ID 1753 | Seq ID 2899 | | | | |
| Seq ID 608 | Seq ID 1754 | Seq ID 2900 | | | | |
| Seq ID 609 | Seq ID 1755 | Seq ID 2901 | | | | |
| Seq ID 610 | Seq ID 1756 | Seq ID 2902 | | | | |
| Seq ID 611 | Seq ID 1757 | Seq ID 2903 | | | | |
| Seq ID 612 | Seq ID 1758 | Seq ID 2904 | | | | |
| Seq ID 613 | Seq ID 1759 | Seq ID 2905 | X | | | |
| Seq ID 614 | Seq ID 1760 | Seq ID 2906 | | | X | |
| Seq ID 615 | Seq ID 1761 | Seq ID 2907 | | | | |
| Seq ID 616 | Seq ID 1762 | Seq ID 2908 | | | | |
| Seq ID 617 | Seq ID 1763 | Seq ID 2909 | | | | |
| Seq ID 618 | Seq ID 1764 | Seq ID 2910 | | | | |
| Seq ID 619 | Seq ID 1765 | Seq ID 2911 | | | | |
| Seq ID 620 | Seq ID 1766 | Seq ID 2912 | | | | |
| Seq ID 621 | Seq ID 1767 | Seq ID 2913 | | | | |
| Seq ID 622 | Seq ID 1768 | Seq ID 2914 | | | | |
| Seq ID 623 | Seq ID 1769 | Seq ID 2915 | | | | |
| Seq ID 624 | Seq ID 1770 | Seq ID 2916 | | | | |
| Seq ID 625 | Seq ID 1771 | Seq ID 2917 | | | | |
| Seq ID 626 | Seq ID 1772 | Seq ID 2918 | | | | |
| Seq ID 627 | Seq ID 1773 | Seq ID 2919 | | | | |
| Seq ID 628 | Seq ID 1774 | Seq ID 2920 | | | | |
| Seq ID 629 | Seq ID 1775 | Seq ID 2921 | | | | |
| Seq ID 630 | Seq ID 1776 | Seq ID 2922 | | | | |
| Seq ID 631 | Seq ID 1777 | Seq ID 2923 | | | | |
| Seq ID 632 | Seq ID 1778 | Seq ID 2924 | | | | |
| Seq ID 633 | Seq ID 1779 | Seq ID 2925 | | | | |
| Seq ID 634 | Seq ID 1780 | Seq ID 2926 | | | | |
| Seq ID 635 | Seq ID 1781 | Seq ID 2927 | | | | |
| Seq ID 636 | Seq ID 1782 | Seq ID 2928 | | | | |
| Seq ID 637 | Seq ID 1783 | Seq ID 2929 | | | | |
| Seq ID 638 | Seq ID 1784 | Seq ID 2930 | | | | |
| Seq ID 639 | Seq ID 1785 | Seq ID 2931 | | | | |
| Seq ID 640 | Seq ID 1786 | Seq ID 2932 | | | | |
| Seq ID 641 | Seq ID 1787 | Seq ID 2933 | | | | |
| Seq ID 642 | Seq ID 1788 | Seq ID 2934 | | | | |
| Seq ID 643 | Seq ID 1789 | Seq ID 2935 | | | | |
| Seq ID 644 | Seq ID 1790 | Seq ID 2936 | | | | |
| Seq ID 645 | Seq ID 1791 | Seq ID 2937 | | | | |
| Seq ID 646 | Seq ID 1792 | Seq ID 2938 | | | | |
| Seq ID 647 | Seq ID 1793 | Seq ID 2939 | | | | |
| Seq ID 648 | Seq ID 1794 | Seq ID 2940 | | | | |
| Seq ID 649 | Seq ID 1795 | Seq ID 2941 | | X | | |
| Seq ID 650 | Seq ID 1796 | Seq ID 2942 | | | | |
| Seq ID 651 | Seq ID 1797 | Seq ID 2943 | X | | | X |
| Seq ID 652 | Seq ID 1798 | Seq ID 2944 | | | | |
| Seq ID 653 | Seq ID 1799 | Seq ID 2945 | | | | |
| Seq ID 654 | Seq ID 1800 | Seq ID 2946 | | | | |
| Seq ID 655 | Seq ID 1801 | Seq ID 2947 | | | | |
| Seq ID 656 | Seq ID 1802 | Seq ID 2948 | | | | |
| Seq ID 657 | Seq ID 1803 | Seq ID 2949 | X | | | X |
| Seq ID 658 | Seq ID 1804 | Seq ID 2950 | X | | | |
| Seq ID 659 | Seq ID 1805 | Seq ID 2951 | | | | |
| Seq ID 660 | Seq ID 1806 | Seq ID 2952 | | | | |
| Seq ID 661 | Seq ID 1807 | Seq ID 2953 | | | | |
| Seq ID 662 | Seq ID 1808 | Seq ID 2954 | | | | |
| Seq ID 663 | Seq ID 1809 | Seq ID 2955 | | | | |
| Seq ID 664 | Seq ID 1810 | Seq ID 2956 | | | | |
| Seq ID 665 | Seq ID 1811 | Seq ID 2957 | | | | |
| Seq ID 666 | Seq ID 1812 | Seq ID 2958 | | | | |
| Seq ID 667 | Seq ID 1813 | Seq ID 2959 | | | | |
| Seq ID 668 | Seq ID 1814 | Seq ID 2960 | X | | | X |
| Seq ID 669 | Seq ID 1815 | Seq ID 2961 | | | | |
| Seq ID 670 | Seq ID 1816 | Seq ID 2962 | | | | |
| Seq ID 671 | Seq ID 1817 | Seq ID 2963 | | | | |
| Seq ID 672 | Seq ID 1818 | Seq ID 2964 | | | | |
| Seq ID 673 | Seq ID 1819 | Seq ID 2965 | | | | |
| Seq ID 674 | Seq ID 1820 | Seq ID 2966 | | | | |
| Seq ID 675 | Seq ID 1821 | Seq ID 2967 | | | | X |
| Seq ID 676 | Seq ID 1822 | Seq ID 2968 | | | | |
| Seq ID 677 | Seq ID 1823 | Seq ID 2969 | | | | |
| Seq ID 678 | Seq ID 1824 | Seq ID 2970 | | | | |
| Seq ID 679 | Seq ID 1825 | Seq ID 2971 | | | | |
| Seq ID 680 | Seq ID 1826 | Seq ID 2972 | | | | |
| Seq ID 681 | Seq ID 1827 | Seq ID 2973 | | | | |
| Seq ID 682 | Seq ID 1828 | Seq ID 2974 | | | | |
| Seq ID 683 | Seq ID 1829 | Seq ID 2975 | | | | |
| Seq ID 684 | Seq ID 1830 | Seq ID 2976 | | | | |
| Seq ID 685 | Seq ID 1831 | Seq ID 2977 | | | | |
| Seq ID 686 | Seq ID 1832 | Seq ID 2978 | X | | | |
| Seq ID 687 | Seq ID 1833 | Seq ID 2979 | | | | |
| Seq ID 688 | Seq ID 1834 | Seq ID 2980 | X | | | |
| Seq ID 689 | Seq ID 1835 | Seq ID 2981 | | | | |
| Seq ID 690 | Seq ID 1836 | Seq ID 2982 | | | | |
| Seq ID 691 | Seq ID 1837 | Seq ID 2983 | | | | |
| Seq ID 692 | Seq ID 1838 | Seq ID 2984 | | | | |
| Seq ID 693 | Seq ID 1839 | Seq ID 2985 | | | | |
| Seq ID 694 | Seq ID 1840 | Seq ID 2986 | | | | |
| Seq ID 695 | Seq ID 1841 | Seq ID 2987 | | | | |
| Seq ID 696 | Seq ID 1842 | Seq ID 2988 | | | | |
| Seq ID 697 | Seq ID 1843 | Seq ID 2989 | | | | |
| Seq ID 698 | Seq ID 1844 | Seq ID 2990 | | | | |
| Seq ID 699 | Seq ID 1845 | Seq ID 2991 | | | | |
| Seq ID 700 | Seq ID 1846 | Seq ID 2992 | | | | |
| Seq ID 701 | Seq ID 1847 | Seq ID 2993 | | | | |
| Seq ID 702 | Seq ID 1848 | Seq ID 2994 | | | | |
| Seq ID 703 | Seq ID 1849 | Seq ID 2995 | | | | |
| Seq ID 704 | Seq ID 1850 | Seq ID 2996 | | | | |
| Seq ID 705 | Seq ID 1851 | Seq ID 2997 | | | | |
| Seq ID 706 | Seq ID 1852 | Seq ID 2998 | | | | |
| Seq ID 707 | Seq ID 1853 | Seq ID 2999 | | | | |
| Seq ID 708 | Seq ID 1854 | Seq ID 3000 | X | | | X |
| Seq ID 709 | Seq ID 1855 | Seq ID 3001 | | | | |
| Seq ID 710 | Seq ID 1856 | Seq ID 3002 | X | | | X |
| Seq ID 711 | Seq ID 1857 | Seq ID 3003 | | | | |
| Seq ID 712 | Seq ID 1858 | Seq ID 3004 | | | | |
| Seq ID 713 | Seq ID 1859 | Seq ID 3005 | | | | |
| Seq ID 714 | Seq ID 1860 | Seq ID 3006 | | | | |
| Seq ID 715 | Seq ID 1861 | Seq ID 3007 | | | | |
| Seq ID 716 | Seq ID 1862 | Seq ID 3008 | X | | | |
| Seq ID 717 | Seq ID 1863 | Seq ID 3009 | | | | |
| Seq ID 718 | Seq ID 1864 | Seq ID 3010 | | | | |
| Seq ID 719 | Seq ID 1865 | Seq ID 3011 | | | | |
| Seq ID 720 | Seq ID 1866 | Seq ID 3012 | X | | | |
| Seq ID 721 | Seq ID 1867 | Seq ID 3013 | | | | |
| Seq ID 722 | Seq ID 1868 | Seq ID 3014 | | | | |
| Seq ID 723 | Seq ID 1869 | Seq ID 3015 | | | | |
| Seq ID 724 | Seq ID 1870 | Seq ID 3016 | X | | | |
| Seq ID 725 | Seq ID 1871 | Seq ID 3017 | | | | |
| Seq ID 726 | Seq ID 1872 | Seq ID 3018 | | | | |
| Seq ID 727 | Seq ID 1873 | Seq ID 3019 | | | | |
| Seq ID 728 | Seq ID 1874 | Seq ID 3020 | | | | |
| Seq ID 729 | Seq ID 1875 | Seq ID 3021 | | | | |
| Seq ID 730 | Seq ID 1876 | Seq ID 3022 | | | | |
| Seq ID 731 | Seq ID 1877 | Seq ID 3023 | X | | | |
| Seq ID 732 | Seq ID 1878 | Seq ID 3024 | X | | | |
| Seq ID 733 | Seq ID 1879 | Seq ID 3025 | | | | |
| Seq ID 734 | Seq ID 1880 | Seq ID 3026 | | | | |
| Seq ID 735 | Seq ID 1881 | Seq ID 3027 | | | | |
| Seq ID 736 | Seq ID 1882 | Seq ID 3028 | | | | |
| Seq ID 737 | Seq ID 1883 | Seq ID 3029 | | | | |
| Seq ID 738 | Seq ID 1884 | Seq ID 3030 | | | | |
| Seq ID 739 | Seq ID 1885 | Seq ID 3031 | | | | |
| Seq ID 740 | Seq ID 1886 | Seq ID 3032 | | | | |
| Seq ID 741 | Seq ID 1887 | Seq ID 3033 | | | | |
| Seq ID 742 | Seq ID 1888 | Seq ID 3034 | | | | |
| Seq ID 743 | Seq ID 1889 | Seq ID 3035 | | | | |
| Seq ID 744 | Seq ID 1890 | Seq ID 3036 | X | | | X |
| Seq ID 745 | Seq ID 1891 | Seq ID 3037 | | | | |
| Seq ID 746 | Seq ID 1892 | Seq ID 3038 | | | | |
| Seq ID 747 | Seq ID 1893 | Seq ID 3039 | | | | |
| Seq ID 748 | Seq ID 1894 | Seq ID 3040 | | | | |
| Seq ID 749 | Seq ID 1895 | Seq ID 3041 | | | | |
| Seq ID 750 | Seq ID 1896 | Seq ID 3042 | | | | |
| Seq ID 751 | Seq ID 1897 | Seq ID 3043 | | | | |
| Seq ID 752 | Seq ID 1898 | Seq ID 3044 | | | | |
| Seq ID 753 | Seq ID 1899 | Seq ID 3045 | | | | |
| Seq ID 754 | Seq ID 1900 | Seq ID 3046 | | | | |
| Seq ID 755 | Seq ID 1901 | Seq ID 3047 | | | | |
| Seq ID 756 | Seq ID 1902 | Seq ID 3048 | | | | |
| Seq ID 757 | Seq ID 1903 | Seq ID 3049 | | | | |
| Seq ID 758 | Seq ID 1904 | Seq ID 3050 | | | | |
| Seq ID 759 | Seq ID 1905 | Seq ID 3051 | | | | |
| Seq ID 760 | Seq ID 1906 | Seq ID 3052 | | | | |
| Seq ID 761 | Seq ID 1907 | Seq ID 3053 | | | | |
| Seq ID 762 | Seq ID 1908 | Seq ID 3054 | | | | |
| Seq ID 763 | Seq ID 1909 | Seq ID 3055 | | | | |
| Seq ID 764 | Seq ID 1910 | Seq ID 3056 | | | | |
| Seq ID 765 | Seq ID 1911 | Seq ID 3057 | | | | |
| Seq ID 766 | Seq ID 1912 | Seq ID 3058 | | | | |
| Seq ID 767 | Seq ID 1913 | Seq ID 3059 | | | | |
| Seq ID 768 | Seq ID 1914 | Seq ID 3060 | | | | |
| Seq ID 769 | Seq ID 1915 | Seq ID 3061 | | | | |
| Seq ID 770 | Seq ID 1916 | Seq ID 3062 | | | | |
| Seq ID 771 | Seq ID 1917 | Seq ID 3063 | | | | |
| Seq ID 772 | Seq ID 1918 | Seq ID 3064 | | | | |
| Seq ID 773 | Seq ID 1919 | Seq ID 3065 | X | | | |
| Seq ID 774 | Seq ID 1920 | Seq ID 3066 | X | | | |
| Seq ID 775 | Seq ID 1921 | Seq ID 3067 | X | | | X |
| Seq ID 776 | Seq ID 1922 | Seq ID 3068 | X | | | |
| Seq ID 777 | Seq ID 1923 | Seq ID 3069 | X | | | X |
| Seq ID 778 | Seq ID 1924 | Seq ID 3070 | | | | |
| Seq ID 779 | Seq ID 1925 | Seq ID 3071 | | | | X |
| Seq ID 780 | Seq ID 1926 | Seq ID 3072 | | | | |
| Seq ID 781 | Seq ID 1927 | Seq ID 3073 | | | | |
| Seq ID 782 | Seq ID 1928 | Seq ID 3074 | | | | |
| Seq ID 783 | Seq ID 1929 | Seq ID 3075 | | | | |
| Seq ID 784 | Seq ID 1930 | Seq ID 3076 | | | | |
| Seq ID 785 | Seq ID 1931 | Seq ID 3077 | | | | |
| Seq ID 786 | Seq ID 1932 | Seq ID 3078 | | | | |
| Seq ID 787 | Seq ID 1933 | Seq ID 3079 | | | | |
| Seq ID 788 | Seq ID 1934 | Seq ID 3080 | X | | | |
| Seq ID 789 | Seq ID 1935 | Seq ID 3081 | | | | |
| Seq ID 790 | Seq ID 1936 | Seq ID 3082 | | | | |
| Seq ID 791 | Seq ID 1937 | Seq ID 3083 | | | | |
| Seq ID 792 | Seq ID 1938 | Seq ID 3084 | | X | | |
| Seq ID 793 | Seq ID 1939 | Seq ID 3085 | X | | | X |
| Seq ID 794 | Seq ID 1940 | Seq ID 3086 | | | | |
| Seq ID 795 | Seq ID 1941 | Seq ID 3087 | | | | |
| Seq ID 796 | Seq ID 1942 | Seq ID 3088 | | | | |
| Seq ID 797 | Seq ID 1943 | Seq ID 3089 | | | | |
| Seq ID 798 | Seq ID 1944 | Seq ID 3090 | | | | |
| Seq ID 799 | Seq ID 1945 | Seq ID 3091 | | | | |
| Seq ID 800 | Seq ID 1946 | Seq ID 3092 | | | | |
| Seq ID 801 | Seq ID 1947 | Seq ID 3093 | | | | |
| Seq ID 802 | Seq ID 1948 | Seq ID 3094 | | | | |
| Seq ID 803 | Seq ID 1949 | Seq ID 3095 | | | | |
| Seq ID 804 | Seq ID 1950 | Seq ID 3096 | | | | |
| Seq ID 805 | Seq ID 1951 | Seq ID 3097 | | | | |
| Seq ID 806 | Seq ID 1952 | Seq ID 3098 | | | | |
| Seq ID 807 | Seq ID 1953 | Seq ID 3099 | | | | |
| Seq ID 808 | Seq ID 1954 | Seq ID 3100 | | | | |
| Seq ID 809 | Seq ID 1955 | Seq ID 3101 | | | | |
| Seq ID 810 | Seq ID 1956 | Seq ID 3102 | | | | |
| Seq ID 811 | Seq ID 1957 | Seq ID 3103 | | | | |
| Seq ID 812 | Seq ID 1958 | Seq ID 3104 | | | | |
| Seq ID 813 | Seq ID 1959 | Seq ID 3105 | | | | |
| Seq ID 814 | Seq ID 1960 | Seq ID 3106 | | | | |
| Seq ID 815 | Seq ID 1961 | Seq ID 3107 | | | | |
| Seq ID 816 | Seq ID 1962 | Seq ID 3108 | | | | |
| Seq ID 817 | Seq ID 1963 | Seq ID 3109 | | | | |
| Seq ID 818 | Seq ID 1964 | Seq ID 3110 | | | | |
| Seq ID 819 | Seq ID 1965 | Seq ID 3111 | | | | |
| Seq ID 820 | Seq ID 1966 | Seq ID 3112 | | | | |
| Seq ID 821 | Seq ID 1967 | Seq ID 3113 | X | | | X |
| Seq ID 822 | Seq ID 1968 | Seq ID 3114 | | | | |
| Seq ID 823 | Seq ID 1969 | Seq ID 3115 | | | | |
| Seq ID 824 | Seq ID 1970 | Seq ID 3116 | | | | |
| Seq ID 825 | Seq ID 1971 | Seq ID 3117 | | | | X |
| Seq ID 826 | Seq ID 1972 | Seq ID 3118 | | | | |
| Seq ID 827 | Seq ID 1973 | Seq ID 3119 | | | | |
| Seq ID 828 | Seq ID 1974 | Seq ID 3120 | | | | |
| Seq ID 829 | Seq ID 1975 | Seq ID 3121 | | | | |
| Seq ID 830 | Seq ID 1976 | Seq ID 3122 | | | | |
| Seq ID 831 | Seq ID 1977 | Seq ID 3123 | | | | |
| Seq ID 832 | Seq ID 1978 | Seq ID 3124 | | | | |
| Seq ID 833 | Seq ID 1979 | Seq ID 3125 | | | | |
| Seq ID 834 | Seq ID 1980 | Seq ID 3126 | | | | |
| Seq ID 835 | Seq ID 1981 | Seq ID 3127 | | | | |
| Seq ID 836 | Seq ID 1982 | Seq ID 3128 | | | | |
| Seq ID 837 | Seq ID 1983 | Seq ID 3129 | | X | | |
| Seq ID 838 | Seq ID 1984 | Seq ID 3130 | | | | |
| Seq ID 839 | Seq ID 1985 | Seq ID 3131 | | | | |
| Seq ID 840 | Seq ID 1986 | Seq ID 3132 | | | | |
| Seq ID 841 | Seq ID 1987 | Seq ID 3133 | | | | |
| Seq ID 842 | Seq ID 1988 | Seq ID 3134 | X | | | |
| Seq ID 843 | Seq ID 1989 | Seq ID 3135 | | | | |
| Seq ID 844 | Seq ID 1990 | Seq ID 3136 | | | | |
| Seq ID 845 | Seq ID 1991 | Seq ID 3137 | | | | |
| Seq ID 846 | Seq ID 1992 | Seq ID 3138 | | | | |
| Seq ID 847 | Seq ID 1993 | Seq ID 3139 | | | | |
| Seq ID 848 | Seq ID 1994 | Seq ID 3140 | | | | |
| Seq ID 849 | Seq ID 1995 | Seq ID 3141 | | | | |
| Seq ID 850 | Seq ID 1996 | Seq ID 3142 | | | | |
| Seq ID 851 | Seq ID 1997 | Seq ID 3143 | | | | |
| Seq ID 852 | Seq ID 1998 | Seq ID 3144 | | | | |
| Seq ID 853 | Seq ID 1999 | Seq ID 3145 | | | | |
| Seq ID 854 | Seq ID 2000 | Seq ID 3146 | | | | |
| Seq ID 855 | Seq ID 2001 | Seq ID 3147 | | | | |
| Seq ID 856 | Seq ID 2002 | Seq ID 3148 | | | | |
| Seq ID 857 | Seq ID 2003 | Seq ID 3149 | | | | |
| Seq ID 858 | Seq ID 2004 | Seq ID 3150 | | | | |
| Seq ID 859 | Seq ID 2005 | Seq ID 3151 | X | | | |
| Seq ID 860 | Seq ID 2006 | Seq ID 3152 | | | | |
| Seq ID 861 | Seq ID 2007 | Seq ID 3153 | | | | |
| Seq ID 862 | Seq ID 2008 | Seq ID 3154 | | | | |
| Seq ID 863 | Seq ID 2009 | Seq ID 3155 | | | | |
| Seq ID 864 | Seq ID 2010 | Seq ID 3156 | | | | |
| Seq ID 865 | Seq ID 2011 | Seq ID 3157 | | | | |
| Seq ID 866 | Seq ID 2012 | Seq ID 3158 | X | | | |
| Seq ID 867 | Seq ID 2013 | Seq ID 3159 | | | | |
| Seq ID 868 | Seq ID 2014 | Seq ID 3160 | | | | |
| Seq ID 869 | Seq ID 2015 | Seq ID 3161 | | | | |
| Seq ID 870 | Seq ID 2016 | Seq ID 3162 | | | | |
| Seq ID 871 | Seq ID 2017 | Seq ID 3163 | | | | |
| Seq ID 872 | Seq ID 2018 | Seq ID 3164 | | | | |
| Seq ID 873 | Seq ID 2019 | Seq ID 3165 | | | | |
| Seq ID 874 | Seq ID 2020 | Seq ID 3166 | | | | |
| Seq ID 875 | Seq ID 2021 | Seq ID 3167 | | | | |
| Seq ID 876 | Seq ID 2022 | Seq ID 3168 | | | | |
| Seq ID 877 | Seq ID 2023 | Seq ID 3169 | | | | |
| Seq ID 878 | Seq ID 2024 | Seq ID 3170 | X | | | X |
| Seq ID 879 | Seq ID 2025 | Seq ID 3171 | | | | |
| Seq ID 880 | Seq ID 2026 | Seq ID 3172 | | | | |
| Seq ID 881 | Seq ID 2027 | Seq ID 3173 | | | | |
| Seq ID 882 | Seq ID 2028 | Seq ID 3174 | | | | |
| Seq ID 883 | Seq ID 2029 | Seq ID 3175 | | | | |
| Seq ID 884 | Seq ID 2030 | Seq ID 3176 | | | | |
| Seq ID 885 | Seq ID 2031 | Seq ID 3177 | | | | |
| Seq ID 886 | Seq ID 2032 | Seq ID 3178 | | | | |
| Seq ID 887 | Seq ID 2033 | Seq ID 3179 | | | | |
| Seq ID 888 | Seq ID 2034 | Seq ID 3180 | X | | | |
| Seq ID 889 | Seq ID 2035 | Seq ID 3181 | | | | |
| Seq ID 890 | Seq ID 2036 | Seq ID 3182 | | | | |
| Seq ID 891 | Seq ID 2037 | Seq ID 3183 | X | | | |
| Seq ID 892 | Seq ID 2038 | Seq ID 3184 | | | | |
| Seq ID 893 | Seq ID 2039 | Seq ID 3185 | | | | |
| Seq ID 894 | Seq ID 2040 | Seq ID 3186 | | | | |
| Seq ID 895 | Seq ID 2041 | Seq ID 3187 | | | | |
| Seq ID 896 | Seq ID 2042 | Seq ID 3188 | | | | |
| Seq ID 897 | Seq ID 2043 | Seq ID 3189 | | | | |
| Seq ID 898 | Seq ID 2044 | Seq ID 3190 | | | | |
| Seq ID 899 | Seq ID 2045 | Seq ID 3191 | | | | |
| Seq ID 900 | Seq ID 2046 | Seq ID 3192 | | | | |
| Seq ID 901 | Seq ID 2047 | Seq ID 3193 | | | | |
| Seq ID 902 | Seq ID 2048 | Seq ID 3194 | | | | |
| Seq ID 903 | Seq ID 2049 | Seq ID 3195 | | | | |
| Seq ID 904 | Seq ID 2050 | Seq ID 3196 | | | | |
| Seq ID 905 | Seq ID 2051 | Seq ID 3197 | | | | |
| Seq ID 906 | Seq ID 2052 | Seq ID 3198 | | | | |
| Seq ID 907 | Seq ID 2053 | Seq ID 3199 | | | | |
| Seq ID 908 | Seq ID 2054 | Seq ID 3200 | | | | |
| Seq ID 909 | Seq ID 2055 | Seq ID 3201 | | | | |
| Seq ID 910 | Seq ID 2056 | Seq ID 3202 | | | | |
| Seq ID 911 | Seq ID 2057 | Seq ID 3203 | | | | |
| Seq ID 912 | Seq ID 2058 | Seq ID 3204 | | | | |
| Seq ID 913 | Seq ID 2059 | Seq ID 3205 | | | | |
| Seq ID 914 | Seq ID 2060 | Seq ID 3206 | | | | |
| Seq ID 915 | Seq ID 2061 | Seq ID 3207 | | | | |
| Seq ID 916 | Seq ID 2062 | Seq ID 3208 | | | | |
| Seq ID 917 | Seq ID 2063 | Seq ID 3209 | | | | |
| Seq ID 918 | Seq ID 2064 | Seq ID 3210 | | | | |
| Seq ID 919 | Seq ID 2065 | Seq ID 3211 | | | | |
| Seq ID 920 | Seq ID 2066 | Seq ID 3212 | | | | |
| Seq ID 921 | Seq ID 2067 | Seq ID 3213 | | | | |
| Seq ID 922 | Seq ID 2068 | Seq ID 3214 | | | | |
| Seq ID 923 | Seq ID 2069 | Seq ID 3215 | | | | |
| Seq ID 924 | Seq ID 2070 | Seq ID 3216 | | | | |
| Seq ID 925 | Seq ID 2071 | Seq ID 3217 | | | | |
| Seq ID 926 | Seq ID 2072 | Seq ID 3218 | X | | | |
| Seq ID 927 | Seq ID 2073 | Seq ID 3219 | | | | |
| Seq ID 928 | Seq ID 2074 | Seq ID 3220 | | | | |
| Seq ID 929 | Seq ID 2075 | Seq ID 3221 | | | | |
| Seq ID 930 | Seq ID 2076 | Seq ID 3222 | | | | |
| Seq ID 931 | Seq ID 2077 | Seq ID 3223 | | | | |
| Seq ID 932 | Seq ID 2078 | Seq ID 3224 | | | | |
| Seq ID 933 | Seq ID 2079 | Seq ID 3225 | | | | |
| Seq ID 934 | Seq ID 2080 | Seq ID 3226 | | | | |
| Seq ID 935 | Seq ID 2081 | Seq ID 3227 | | | | |
| Seq ID 936 | Seq ID 2082 | Seq ID 3228 | | | | |
| Seq ID 937 | Seq ID 2083 | Seq ID 3229 | | | | |
| Seq ID 938 | Seq ID 2084 | Seq ID 3230 | | | | |
| Seq ID 939 | Seq ID 2085 | Seq ID 3231 | | | | |
| Seq ID 940 | Seq ID 2086 | Seq ID 3232 | | | | |
| Seq ID 941 | Seq ID 2087 | Seq ID 3233 | | | | |
| Seq ID 942 | Seq ID 2088 | Seq ID 3234 | | | | |
| Seq ID 943 | Seq ID 2089 | Seq ID 3235 | | | | |
| Seq ID 944 | Seq ID 2090 | Seq ID 3236 | | | | |
| Seq ID 945 | Seq ID 2091 | Seq ID 3237 | | | | |
| Seq ID 946 | Seq ID 2092 | Seq ID 3238 | | | | |
| Seq ID 947 | Seq ID 2093 | Seq ID 3239 | | | | |
| Seq ID 948 | Seq ID 2094 | Seq ID 3240 | | | | |
| Seq ID 949 | Seq ID 2095 | Seq ID 3241 | | | | |
| Seq ID 950 | Seq ID 2096 | Seq ID 3242 | | | | |
| Seq ID 951 | Seq ID 2097 | Seq ID 3243 | | | | |
| Seq ID 952 | Seq ID 2098 | Seq ID 3244 | | | | |
| Seq ID 953 | Seq ID 2099 | Seq ID 3245 | | | | |
| Seq ID 954 | Seq ID 2100 | Seq ID 3246 | X | | | |
| Seq ID 955 | Seq ID 2101 | Seq ID 3247 | | | | |
| Seq ID 956 | Seq ID 2102 | Seq ID 3248 | | | | |
| Seq ID 957 | Seq ID 2103 | Seq ID 3249 | | | | |
| Seq ID 958 | Seq ID 2104 | Seq ID 3250 | | | | |
| Seq ID 959 | Seq ID 2105 | Seq ID 3251 | | | | |
| Seq ID 960 | Seq ID 2106 | Seq ID 3252 | | | | |
| Seq ID 961 | Seq ID 2107 | Seq ID 3253 | | | | |
| Seq ID 962 | Seq ID 2108 | Seq ID 3254 | | | | |
| Seq ID 963 | Seq ID 2109 | Seq ID 3255 | X | | | |
| Seq ID 964 | Seq ID 2110 | Seq ID 3256 | | | | |
| Seq ID 965 | Seq ID 2111 | Seq ID 3257 | | | | |
| Seq ID 966 | Seq ID 2112 | Seq ID 3258 | | | | |
| Seq ID 967 | Seq ID 2113 | Seq ID 3259 | | | | |
| Seq ID 968 | Seq ID 2114 | Seq ID 3260 | | | | |
| Seq ID 969 | Seq ID 2115 | Seq ID 3261 | | | | |
| Seq ID 970 | Seq ID 2116 | Seq ID 3262 | | | | |
| Seq ID 971 | Seq ID 2117 | Seq ID 3263 | | | | |
| Seq ID 972 | Seq ID 2118 | Seq ID 3264 | | | | |
| Seq ID 973 | Seq ID 2119 | Seq ID 3265 | X | | | |
| Seq ID 974 | Seq ID 2120 | Seq ID 3266 | | | | |
| Seq ID 975 | Seq ID 2121 | Seq ID 3267 | | | | |
| Seq ID 976 | Seq ID 2122 | Seq ID 3268 | | | | |
| Seq ID 977 | Seq ID 2123 | Seq ID 3269 | | | | |
| Seq ID 978 | Seq ID 2124 | Seq ID 3270 | | | | |
| Seq ID 979 | Seq ID 2125 | Seq ID 3271 | | | | |
| Seq ID 980 | Seq ID 2126 | Seq ID 3272 | | | | |
| Seq ID 981 | Seq ID 2127 | Seq ID 3273 | | | | |
| Seq ID 982 | Seq ID 2128 | Seq ID 3274 | X | | | |
| Seq ID 983 | Seq ID 2129 | Seq ID 3275 | X | | | X |
| Seq ID 984 | Seq ID 2130 | Seq ID 3276 | X | | | |
| Seq ID 985 | Seq ID 2131 | Seq ID 3277 | | | | |
| Seq ID 986 | Seq ID 2132 | Seq ID 3278 | | | | |
| Seq ID 987 | Seq ID 2133 | Seq ID 3279 | | | | |
| Seq ID 988 | Seq ID 2134 | Seq ID 3280 | | | | |
| Seq ID 989 | Seq ID 2135 | Seq ID 3281 | | | | |
| Seq ID 990 | Seq ID 2136 | Seq ID 3282 | | | | |
| Seq ID 991 | Seq ID 2137 | Seq ID 3283 | | | | |
| Seq ID 992 | Seq ID 2138 | Seq ID 3284 | | | | |
| Seq ID 993 | Seq ID 2139 | Seq ID 3285 | | | | |
| Seq ID 994 | Seq ID 2140 | Seq ID 3286 | X | | | |
| Seq ID 995 | Seq ID 2141 | Seq ID 3287 | | | | |
| Seq ID 996 | Seq ID 2142 | Seq ID 3288 | X | | X | |
| Seq ID 997 | Seq ID 2143 | Seq ID 3289 | | | | |
| Seq ID 998 | Seq ID 2144 | Seq ID 3290 | | | | |
| Seq ID 999 | Seq ID 2145 | Seq ID 3291 | | | | |
| Seq ID 1000 | Seq ID 2146 | Seq ID 3292 | | | | |
| Seq ID 1001 | Seq ID 2147 | Seq ID 3293 | | | | |
| Seq ID 1002 | Seq ID 2148 | Seq ID 3294 | | | | |
| Seq ID 1003 | Seq ID 2149 | Seq ID 3295 | | | | |
| Seq ID 1004 | Seq ID 2150 | Seq ID 3296 | X | | | |
| Seq ID 1005 | Seq ID 2151 | Seq ID 3297 | | | | |
| Seq ID 1006 | Seq ID 2152 | Seq ID 3298 | | | | |
| Seq ID 1007 | Seq ID 2153 | Seq ID 3299 | | | | |
| Seq ID 1008 | Seq ID 2154 | Seq ID 3300 | | | | |
| Seq ID 1009 | Seq ID 2155 | Seq ID 3301 | | | | |
| Seq ID 1010 | Seq ID 2156 | Seq ID 3302 | | | | |
| Seq ID 1011 | Seq ID 2157 | Seq ID 3303 | | | | |
| Seq ID 1012 | Seq ID 2158 | Seq ID 3304 | | | | |
| Seq ID 1013 | Seq ID 2159 | Seq ID 3305 | | | | |
| Seq ID 1014 | Seq ID 2160 | Seq ID 3306 | | | | |
| Seq ID 1015 | Seq ID 2161 | Seq ID 3307 | | | | |
| Seq ID 1016 | Seq ID 2162 | Seq ID 3308 | | | | |
| Seq ID 1017 | Seq ID 2163 | Seq ID 3309 | | | | |
| Seq ID 1018 | Seq ID 2164 | Seq ID 3310 | | | | |
| Seq ID 1019 | Seq ID 2165 | Seq ID 3311 | X | | | |
| Seq ID 1020 | Seq ID 2166 | Seq ID 3312 | | | | |
| Seq ID 1021 | Seq ID 2167 | Seq ID 3313 | | | | |
| Seq ID 1022 | Seq ID 2168 | Seq ID 3314 | | | | |
| Seq ID 1023 | Seq ID 2169 | Seq ID 3315 | | | | |
| Seq ID 1024 | Seq ID 2170 | Seq ID 3316 | | | | |
| Seq ID 1025 | Seq ID 2171 | Seq ID 3317 | | | | |
| Seq ID 1026 | Seq ID 2172 | Seq ID 3318 | X | | | |
| Seq ID 1027 | Seq ID 2173 | Seq ID 3319 | | | | |
| Seq ID 1028 | Seq ID 2174 | Seq ID 3320 | | | X | |
| Seq ID 1029 | Seq ID 2175 | Seq ID 3321 | | | | |
| Seq ID 1030 | Seq ID 2176 | Seq ID 3322 | | | | |
| Seq ID 1031 | Seq ID 2177 | Seq ID 3323 | | | | |
| Seq ID 1032 | Seq ID 2178 | Seq ID 3324 | | | | |
| Seq ID 1033 | Seq ID 2179 | Seq ID 3325 | | | | |
| Seq ID 1034 | Seq ID 2180 | Seq ID 3326 | | | | |
| Seq ID 1035 | Seq ID 2181 | Seq ID 3327 | | | | |
| Seq ID 1036 | Seq ID 2182 | Seq ID 3328 | | | | |
| Seq ID 1037 | Seq ID 2183 | Seq ID 3329 | | | | |
| Seq ID 1038 | Seq ID 2184 | Seq ID 3330 | | | | |
| Seq ID 1039 | Seq ID 2185 | Seq ID 3331 | | | | |
| Seq ID 1040 | Seq ID 2186 | Seq ID 3332 | | | | |
| Seq ID 1041 | Seq ID 2187 | Seq ID 3333 | | | | |
| Seq ID 1042 | Seq ID 2188 | Seq ID 3334 | | | | |
| Seq ID 1043 | Seq ID 2189 | Seq ID 3335 | | | | |
| Seq ID 1044 | Seq ID 2190 | Seq ID 3336 | | | | |
| Seq ID 1045 | Seq ID 2191 | Seq ID 3337 | | | | |
| Seq ID 1046 | Seq ID 2192 | Seq ID 3338 | | | | |
| Seq ID 1047 | Seq ID 2193 | Seq ID 3339 | | | | |
| Seq ID 1048 | Seq ID 2194 | Seq ID 3340 | | | | |
| Seq ID 1049 | Seq ID 2195 | Seq ID 3341 | | | | |
| Seq ID 1050 | Seq ID 2196 | Seq ID 3342 | | | | |
| Seq ID 1051 | Seq ID 2197 | Seq ID 3343 | | | | |
| Seq ID 1052 | Seq ID 2198 | Seq ID 3344 | X | | | |
| Seq ID 1053 | Seq ID 2199 | Seq ID 3345 | | | | |
| Seq ID 1054 | Seq ID 2200 | Seq ID 3346 | | | | |
| Seq ID 1055 | Seq ID 2201 | Seq ID 3347 | | | | |
| Seq ID 1056 | Seq ID 2202 | Seq ID 3348 | | | | |
| Seq ID 1057 | Seq ID 2203 | Seq ID 3349 | | | | |
| Seq ID 1058 | Seq ID 2204 | Seq ID 3350 | | | | |
| Seq ID 1059 | Seq ID 2205 | Seq ID 3351 | | | | |
| Seq ID 1060 | Seq ID 2206 | Seq ID 3352 | X | | | |
| Seq ID 1061 | Seq ID 2207 | Seq ID 3353 | | | | |
| Seq ID 1062 | Seq ID 2208 | Seq ID 3354 | | | | |
| Seq ID 1063 | Seq ID 2209 | Seq ID 3355 | | | | |
| Seq ID 1064 | Seq ID 2210 | Seq ID 3356 | X | | | |
| Seq ID 1065 | Seq ID 2211 | Seq ID 3357 | | | | |
| Seq ID 1066 | Seq ID 2212 | Seq ID 3358 | X | | | |
| Seq ID 1067 | Seq ID 2213 | Seq ID 3359 | | | | |
| Seq ID 1068 | Seq ID 2214 | Seq ID 3360 | | | | |
| Seq ID 1069 | Seq ID 2215 | Seq ID 3361 | | | | |
| Seq ID 1070 | Seq ID 2216 | Seq ID 3362 | | | | |
| Seq ID 1071 | Seq ID 2217 | Seq ID 3363 | | | | |
| Seq ID 1072 | Seq ID 2218 | Seq ID 3364 | | | | |
| Seq ID 1073 | Seq ID 2219 | Seq ID 3365 | | | | |
| Seq ID 1074 | Seq ID 2220 | Seq ID 3366 | | | | |
| Seq ID 1075 | Seq ID 2221 | Seq ID 3367 | | | | |
| Seq ID 1076 | Seq ID 2222 | Seq ID 3368 | X | | | |
| Seq ID 1077 | Seq ID 2223 | Seq ID 3369 | | | | |
| Seq ID 1078 | Seq ID 2224 | Seq ID 3370 | | | | |
| Seq ID 1079 | Seq ID 2225 | Seq ID 3371 | | | | |
| Seq ID 1080 | Seq ID 2226 | Seq ID 3372 | | | | |
| Seq ID 1081 | Seq ID 2227 | Seq ID 3373 | X | | | |
| Seq ID 1082 | Seq ID 2228 | Seq ID 3374 | | | | |
| Seq ID 1083 | Seq ID 2229 | Seq ID 3375 | | | | |
| Seq ID 1084 | Seq ID 2230 | Seq ID 3376 | | | | |
| Seq ID 1085 | Seq ID 2231 | Seq ID 3377 | | | | |
| Seq ID 1086 | Seq ID 2232 | Seq ID 3378 | | | | |
| Seq ID 1087 | Seq ID 2233 | Seq ID 3379 | | | | |
| Seq ID 1088 | Seq ID 2234 | Seq ID 3380 | | | | |
| Seq ID 1089 | Seq ID 2235 | Seq ID 3381 | | | | |
| Seq ID 1090 | Seq ID 2236 | Seq ID 3382 | | | | |
| Seq ID 1091 | Seq ID 2237 | Seq ID 3383 | | | | |
| Seq ID 1092 | Seq ID 2238 | Seq ID 3384 | | | | |
| Seq ID 1093 | Seq ID 2239 | Seq ID 3385 | | | | |
| Seq ID 1094 | Seq ID 2240 | Seq ID 3386 | | | | |
| Seq ID 1095 | Seq ID 2241 | Seq ID 3387 | X | | | |
| Seq ID 1096 | Seq ID 2242 | Seq ID 3388 | | | | |
| Seq ID 1097 | Seq ID 2243 | Seq ID 3389 | | | | |
| Seq ID 1098 | Seq ID 2244 | Seq ID 3390 | | | | |
| Seq ID 1099 | Seq ID 2245 | Seq ID 3391 | | | | |
| Seq ID 1100 | Seq ID 2246 | Seq ID 3392 | | | | |
| Seq ID 1101 | Seq ID 2247 | Seq ID 3393 | | | | |
| Seq ID 1102 | Seq ID 2248 | Seq ID 3394 | | | | |
| Seq ID 1103 | Seq ID 2249 | Seq ID 3395 | X | | | |
| Seq ID 1104 | Seq ID 2250 | Seq ID 3396 | | | | |
| Seq ID 1105 | Seq ID 2251 | Seq ID 3397 | | | | |
| Seq ID 1106 | Seq ID 2252 | Seq ID 3398 | | | | |
| Seq ID 1107 | Seq ID 2253 | Seq ID 3399 | | | | |
| Seq ID 1108 | Seq ID 2254 | Seq ID 3400 | | | | |
| Seq ID 1109 | Seq ID 2255 | Seq ID 3401 | | | | |
| Seq ID 1110 | Seq ID 2256 | Seq ID 3402 | | | | |
| Seq ID 1111 | Seq ID 2257 | Seq ID 3403 | | | | |
| Seq ID 1112 | Seq ID 2258 | Seq ID 3404 | | | | |
| Seq ID 1113 | Seq ID 2259 | Seq ID 3405 | | | | |
| Seq ID 1114 | Seq ID 2260 | Seq ID 3406 | | | | |
| Seq ID 1115 | Seq ID 2261 | Seq ID 3407 | | | | |
| Seq ID 1116 | Seq ID 2262 | Seq ID 3408 | | | | |
| Seq ID 1117 | Seq ID 2263 | Seq ID 3409 | | | | |
| Seq ID 1118 | Seq ID 2264 | Seq ID 3410 | | | | |
| Seq ID 1119 | Seq ID 2265 | Seq ID 3411 | | | | |
| Seq ID 1120 | Seq ID 2266 | Seq ID 3412 | | | | |
| Seq ID 1121 | Seq ID 2267 | Seq ID 3413 | | | | |
| Seq ID 1122 | Seq ID 2268 | Seq ID 3414 | | | | |
| Seq ID 1123 | Seq ID 2269 | Seq ID 3415 | | | | |
| Seq ID 1124 | Seq ID 2270 | Seq ID 3416 | | | | |
| Seq ID 1125 | Seq ID 2271 | Seq ID 3417 | | | | |
| Seq ID 1126 | Seq ID 2272 | Seq ID 3418 | | | | |
| Seq ID 1127 | Seq ID 2273 | Seq ID 3419 | | | | |
| Seq ID 1128 | Seq ID 2274 | Seq ID 3420 | | | | |
| Seq ID 1129 | Seq ID 2275 | Seq ID 3421 | | | | |
| Seq ID 1130 | Seq ID 2276 | Seq ID 3422 | | | | |
| Seq ID 1131 | Seq ID 2277 | Seq ID 3423 | | | | |
| Seq ID 1132 | Seq ID 2278 | Seq ID 3424 | | | | |
| Seq ID 1133 | Seq ID 2279 | Seq ID 3425 | | | | |
| Seq ID 1134 | Seq ID 2280 | Seq ID 3426 | | | | |
| Seq ID 1135 | Seq ID 2281 | Seq ID 3427 | | | | |
| Seq ID 1136 | Seq ID 2282 | Seq ID 3428 | | | | |
| Seq ID 1137 | Seq ID 2283 | Seq ID 3429 | | | | |
| Seq ID 1138 | Seq ID 2284 | Seq ID 3430 | | | | |
| Seq ID 1139 | Seq ID 2285 | Seq ID 3431 | | | | |
| Seq ID 1140 | Seq ID 2286 | Seq ID 3432 | | | | |
| Seq ID 1141 | Seq ID 2287 | Seq ID 3433 | | | | |
| Seq ID 1142 | Seq ID 2288 | Seq ID 3434 | | | | |
| Seq ID 1143 | Seq ID 2289 | Seq ID 3435 | | | | |
| Seq ID 1144 | Seq ID 2290 | Seq ID 3436 | | | | |
| Seq ID 1145 | Seq ID 2291 | Seq ID 3437 | | | | |
| Seq ID 1146 | Seq ID 2292 | Seq ID 3438 | | | | |

TABLE 7

| Colon | Nonparametric | | Global | | | | | |
|---|---|---|---|---|---|---|---|---|
| Nucleotide ID | Exp | Order | 5 | 4 | 3 | 2 | 1 | 0 |
| Seq ID 002 | 1 | 1 | 0 | 0 | 0 | 1 | 4 | 6 |
| Seq ID 008 | 3 | 2 | 0 | 0 | 3 | 3 | 1 | 4 |
| Seq ID 009 | 2 | 3 | 0 | 0 | 1 | 6 | 0 | 4 |
| Seq ID 013 | 2 | 2 | 0 | 0 | 0 | 3 | 2 | 6 |
| Seq ID 014 | 3 | 2 | 0 | 0 | 2 | 2 | 1 | 6 |
| Seq ID 019 | 3 | 3 | 0 | 1 | 2 | 1 | 3 | 4 |
| Seq ID 023 | 2 | 3 | 0 | 1 | 0 | 4 | 2 | 4 |
| Seq ID 025 | 3 | 3 | 0 | 3 | 2 | 0 | 2 | 4 |
| Seq ID 028 | 3 | 3 | 0 | 0 | 7 | 1 | 0 | 3 |
| Seq ID 046 | 2 | 3 | 0 | 0 | 0 | 4 | 3 | 4 |
| Seq ID 052 | 5 | 4 | 3 | 0 | 0 | 0 | 5 | 3 |
| Seq ID 072 | 1 | 3 | 0 | 0 | 1 | 1 | 2 | 7 |
| Seq ID 078 | 3 | 4 | 0 | 2 | 1 | 1 | 2 | 5 |
| Seq ID 079 | 4 | 4 | 0 | 3 | 1 | 0 | 6 | 1 |
| Seq ID 086 | 3 | 3 | 0 | 0 | 4 | 0 | 1 | 6 |
| Seq ID 116 | 3 | 3 | 0 | 0 | 4 | 0 | 2 | 5 |
| Seq ID 129 | 3 | 3 | 0 | 0 | 3 | 1 | 1 | 6 |
| Seq ID 142 | 2 | 4 | 0 | 0 | 3 | 5 | 0 | 3 |
| Seq ID 160 | 3 | 3 | 0 | 1 | 2 | 0 | 2 | 6 |
| Seq ID 174 | 2 | 3 | 0 | 0 | 1 | 5 | 0 | 5 |
| Seq ID 178 | 2 | 2 | 0 | 0 | 3 | 1 | 1 | 6 |
| Seq ID 198 | 3 | 3 | 0 | 0 | 2 | 0 | 7 | 2 |
| Seq ID 203 | 3 | 3 | 0 | 0 | 3 | 0 | 6 | 2 |
| Seq ID 212 | 2 | 3 | 0 | 0 | 0 | 3 | 2 | 6 |
| Seq ID 235 | 3 | 4 | 0 | 1 | 5 | 2 | 0 | 3 |
| Seq ID 269 | 4 | 4 | 0 | 3 | 0 | 0 | 0 | 8 |
| Seq ID 270 | 3 | 2 | 0 | 0 | 3 | 1 | 3 | 4 |
| Seq ID 274 | 2 | 3 | 0 | 0 | 0 | 5 | 0 | 6 |
| Seq ID 282 | 3 | 4 | 0 | 3 | 3 | 2 | 0 | 3 |
| Seq ID 286 | 3 | 3 | 0 | 0 | 4 | 0 | 4 | 3 |
| Seq ID 288 | 3 | 4 | 0 | 2 | 3 | 2 | 1 | 3 |
| Seq ID 292 | 3 | 3 | 1 | 0 | 0 | 1 | 2 | 7 |
| Seq ID 305 | 3 | 4 | 0 | 1 | 1 | 2 | 3 | 4 |
| Seq ID 312 | 1 | 1 | 0 | 0 | 1 | 1 | 5 | 4 |
| Seq ID 316 | 3 | 3 | 0 | 0 | 2 | 0 | 1 | 8 |
| Seq ID 347 | 2 | 1 | 0 | 0 | 0 | 1 | 4 | 6 |
| Seq ID 348 | 3 | 3 | 0 | 0 | 2 | 1 | 3 | 5 |
| Seq ID 354 | 3 | 3 | 0 | 0 | 3 | 4 | 1 | 3 |
| Seq ID 355 | 3 | 4 | 0 | 1 | 5 | 1 | 1 | 3 |
| Seq ID 357 | 3 | 4 | 0 | 1 | 4 | 4 | 0 | 2 |
| Seq ID 360 | 3 | 3 | 0 | 0 | 2 | 1 | 4 | 4 |
| Seq ID 371 | 2 | 3 | 0 | 0 | 1 | 6 | 1 | 3 |
| Seq ID 372 | 3 | 3 | 0 | 1 | 2 | 2 | 1 | 5 |
| Seq ID 404 | 0 | 0 | 0 | 1 | 0 | 0 | 0 | 10 |
| Seq ID 433 | 3 | 3 | 0 | 0 | 3 | 1 | 0 | 7 |
| Seq ID 435 | 4 | 4 | 0 | 1 | 2 | 2 | 0 | 6 |
| Seq ID 437 | 1 | 1 | 0 | 0 | 0 | 0 | 4 | 7 |
| Seq ID 463 | 2 | 3 | 0 | 0 | 0 | 4 | 3 | 4 |
| Seq ID 469 | 2 | 3 | 0 | 0 | 2 | 1 | 2 | 6 |
| Seq ID 471 | 3 | 3 | 0 | 2 | 1 | 4 | 1 | 3 |
| Seq ID 477 | 2 | 2 | 0 | 0 | 1 | 0 | 1 | 9 |
| Seq ID 479 | 3 | 3 | 0 | 0 | 6 | 1 | 0 | 4 |
| Seq ID 486 | 3 | 3 | 0 | 0 | 5 | 0 | 0 | 6 |
| Seq ID 500 | 3 | 3 | 0 | 0 | 4 | 0 | 4 | 3 |
| Seq ID 507 | 2 | 2 | 0 | 0 | 1 | 7 | 0 | 3 |
| Seq ID 509 | 3 | 3 | 0 | 0 | 3 | 0 | 5 | 3 |
| Seq ID 525 | 2 | 2 | 0 | 0 | 0 | 2 | 2 | 7 |
| Seq ID 534 | 3 | 3 | 0 | 3 | 1 | 1 | 3 | 3 |
| Seq ID 543 | 1 | 2 | 0 | 0 | 0 | 0 | 3 | 8 |
| Seq ID 553 | 3 | 3 | 0 | 0 | 3 | 2 | 2 | 4 |
| Seq ID 562 | 2 | 2 | 0 | 0 | 1 | 3 | 2 | 5 |
| Seq ID 565 | 4 | 4 | 0 | 2 | 3 | 0 | 1 | 5 |
| Seq ID 586 | 1 | 2 | 0 | 0 | 2 | 2 | 1 | 6 |
| Seq ID 592 | 3 | 2 | 0 | 1 | 4 | 1 | 2 | 3 |
| Seq ID 613 | 2 | 2 | 0 | 0 | 1 | 6 | 0 | 4 |
| Seq ID 651 | 3 | 2 | 0 | 0 | 1 | 0 | 1 | 9 |
| Seq ID 657 | 3 | 3 | 0 | 0 | 4 | 0 | 4 | 3 |
| Seq ID 658 | 1 | 2 | 0 | 0 | 1 | 4 | 0 | 6 |
| Seq ID 668 | 2 | 3 | 0 | 0 | 0 | 1 | 5 | 5 |
| Seq ID 686 | 3 | 3 | 0 | 1 | 5 | 0 | 2 | 3 |
| Seq ID 688 | 1 | 1 | 0 | 0 | 0 | 1 | 5 | 5 |
| Seq ID 708 | 3 | 3 | 0 | 0 | 3 | 0 | 3 | 5 |
| Seq ID 710 | 1 | 1 | 0 | 0 | 0 | 0 | 9 | 2 |
| Seq ID 716 | 2 | 2 | 0 | 1 | 0 | 4 | 3 | 3 |
| Seq ID 720 | 3 | 3 | 0 | 3 | 1 | 1 | 4 | 2 |
| Seq ID 724 | 0 | 2 | 0 | 2 | 0 | 0 | 1 | 8 |
| Seq ID 731 | 1 | 2 | 0 | 0 | 0 | 2 | 1 | 8 |
| Seq ID 732 | 3 | 4 | 0 | 1 | 3 | 0 | 3 | 4 |
| Seq ID 744 | 1 | 0 | 0 | 0 | 3 | 0 | 1 | 7 |
| Seq ID 773 | 2 | 3 | 1 | 0 | 0 | 3 | 5 | 2 |
| Seq ID 774 | 3 | 3 | 0 | 1 | 4 | 1 | 1 | 4 |
| Seq ID 775 | 3 | 3 | 0 | 0 | 2 | 3 | 3 | 3 |
| Seq ID 776 | 3 | 4 | 0 | 2 | 3 | 1 | 2 | 3 |
| Seq ID 777 | 3 | 4 | 0 | 2 | 5 | 0 | 0 | 4 |
| Seq ID 788 | 3 | 4 | 0 | 1 | 4 | 0 | 0 | 6 |
| Seq ID 793 | 3 | 3 | 0 | 0 | 6 | 0 | 1 | 4 |
| Seq ID 821 | 1 | 1 | 0 | 0 | 0 | 0 | 5 | 6 |
| Seq ID 842 | 2 | 2 | 0 | 1 | 1 | 2 | 1 | 6 |
| Seq ID 859 | 3 | 3 | 0 | 0 | 2 | 3 | 1 | 5 |
| Seq ID 866 | 2 | 3 | 0 | 0 | 0 | 6 | 0 | 5 |
| Seq ID 878 | 3 | 3 | 0 | 0 | 5 | 0 | 4 | 2 |
| Seq ID 888 | 2 | 3 | 0 | 0 | 1 | 1 | 0 | 9 |
| Seq ID 891 | 4 | 4 | 0 | 4 | 2 | 1 | 0 | 4 |
| Seq ID 926 | 2 | 1 | 0 | 0 | 2 | 1 | 0 | 8 |
| Seq ID 954 | 4 | 4 | 0 | 3 | 1 | 1 | 1 | 5 |
| Seq ID 963 | 1 | 0 | 0 | 0 | 0 | 0 | 4 | 7 |
| Seq ID 973 | 2 | 3 | 0 | 0 | 3 | 1 | 1 | 6 |
| Seq ID 982 | 2 | 2 | 0 | 0 | 0 | 2 | 4 | 5 |
| Seq ID 983 | 3 | 3 | 0 | 0 | 6 | 3 | 0 | 2 |
| Seq ID 984 | 2 | 3 | 0 | 0 | 1 | 4 | 0 | 6 |
| Seq ID 994 | 3 | 4 | 0 | 5 | 0 | 1 | 0 | 5 |
| Seq ID 996 | 3 | 4 | 0 | 1 | 1 | 1 | 2 | 6 |
| Seq ID 1004 | 2 | 3 | 0 | 0 | 2 | 3 | 1 | 5 |
| Seq ID 1019 | 2 | 4 | 0 | 1 | 1 | 5 | 3 | 1 |
| Seq ID 1026 | 2 | 3 | 0 | 0 | 2 | 2 | 2 | 5 |
| Seq ID 1052 | 3 | 2 | 0 | 0 | 1 | 0 | 6 | 4 |
| Seq ID 1060 | 2 | 4 | 0 | 2 | 1 | 1 | 1 | 6 |
| Seq ID 1064 | 1 | 2 | 0 | 0 | 0 | 0 | 5 | 6 |
| Seq ID 1066 | 0 | 0 | 0 | 0 | 0 | 3 | 0 | 8 |
| Seq ID 1076 | 2 | 2 | 0 | 1 | 0 | 2 | 0 | 8 |
| Seq ID 1081 | 2 | 2 | 0 | 0 | 1 | 5 | 0 | 5 |
| Seq ID 1095 | 2 | 3 | 0 | 0 | 3 | 2 | 4 | 2 |
| Seq ID 1103 | 3 | 3 | 0 | 0 | 6 | 0 | 1 | 4 |

TABLE 8

| Lung | Nonparametric | | Global | | | | | |
|---|---|---|---|---|---|---|---|---|
| Nucleotide ID | Exp | Order | 5 | 4 | 3 | 2 | 1 | 0 |
| Seq ID 034 | 2 | 2 | 1 | 3 | 0 | 1 | 4 | 1 |
| Seq ID 310 | 2 | 3 | 0 | 0 | 0 | 0 | 5 | 5 |
| Seq ID 368 | 4 | 4 | 1 | 2 | 0 | 0 | 4 | 3 |
| Seq ID 371 | 3 | 3 | 0 | 0 | 0 | 9 | 0 | 1 |
| Seq ID 444 | 1 | 1 | 0 | 0 | 0 | 1 | 0 | 9 |
| Seq ID 649 | 1 | 0 | 0 | 0 | 0 | 0 | 0 | 10 |
| Seq ID 792 | 1 | 0 | 2 | 1 | 0 | 0 | 4 | 3 |
| Seq ID 837 | 0 | 0 | 1 | 0 | 1 | 0 | 0 | 8 |

TABLE 9

| Pancreas | Nonparametric | | Global | | | | | |
|---|---|---|---|---|---|---|---|---|
| Nucleotide ID | Exp | Order | 5 | 4 | 3 | 2 | 1 | 0 |
| Seq ID 078 | 4 | 4 | 0 | 3 | 2 | 0 | 0 | 0 |
| Seq ID 089 | 4 | 4 | 4 | 0 | 0 | 0 | 0 | 1 |
| Seq ID 129 | 5 | 5 | 1 | 4 | 0 | 0 | 0 | 0 |
| Seq ID 292 | 5 | 5 | 4 | 0 | 1 | 0 | 0 | 0 |
| Seq ID 559 | 4 | 5 | 4 | 0 | 0 | 0 | 0 | 1 |
| Seq ID 614 | 5 | 4 | 1 | 3 | 0 | 1 | 0 | 0 |
| Seq ID 996 | 5 | 5 | 0 | 4 | 0 | 0 | 0 | 1 |
| Seq ID 1028 | 5 | 5 | 2 | 0 | 0 | 1 | 1 | 1 |

TABLE 10

| Ovary | Nonparameteric | | Global | | | | | |
|---|---|---|---|---|---|---|---|---|
| Nucleotide ID | Exp | Order | 5 | 4 | 3 | 2 | 1 | 0 |
| Seq ID 014 | 4 | 4 | 2 | 1 | 1 | 1 | 0 | 1 |
| Seq ID 046 | 4 | 4 | 1 | 0 | 4 | 1 | 0 | 0 |
| Seq ID 062 | 3 | 4 | 0 | 2 | 0 | 0 | 4 | 0 |
| Seq ID 198 | 4 | 4 | 2 | 1 | 3 | 0 | 0 | 0 |
| Seq ID 270 | 4 | 4 | 2 | 0 | 3 | 1 | 0 | 0 |
| Seq ID 282 | 4 | 4 | 0 | 2 | 3 | 1 | 0 | 0 |
| Seq ID 311 | 0 | 0 | 1 | 0 | 0 | 1 | 0 | 4 |
| Seq ID 355 | 4 | 4 | 0 | 1 | 4 | 1 | 0 | 0 |
| Seq ID 360 | 3 | 3 | 0 | 0 | 3 | 0 | 3 | 0 |
| Seq ID 486 | 4 | 4 | 0 | 3 | 2 | 1 | 0 | 0 |
| Seq ID 500 | 3 | 3 | 0 | 1 | 4 | 0 | 1 | 0 |
| Seq ID 507 | 5 | 5 | 0 | 3 | 2 | 1 | 0 | 0 |
| Seq ID 509 | 3 | 3 | 0 | 0 | 5 | 1 | 0 | 0 |
| Seq ID 559 | 5 | 5 | 2 | 0 | 0 | 1 | 3 | 0 |
| Seq ID 581 | 3 | 3 | 0 | 0 | 4 | 1 | 1 | 0 |
| Seq ID 592 | 3 | 2 | 0 | 0 | 4 | 1 | 1 | 0 |
| Seq ID 651 | 4 | 3 | 1 | 1 | 3 | 0 | 0 | 1 |
| Seq ID 657 | 3 | 3 | 1 | 0 | 3 | 0 | 2 | 0 |
| Seq ID 668 | 4 | 4 | 2 | 0 | 3 | 1 | 0 | 0 |
| Seq ID 675 | 4 | 5 | 2 | 0 | 0 | 1 | 1 | 2 |
| Seq ID 708 | 4 | 4 | 0 | 1 | 4 | 1 | 0 | 0 |
| Seq ID 710 | 4 | 5 | 0 | 0 | 3 | 2 | 1 | 0 |
| Seq ID 744 | 4 | 4 | 1 | 1 | 3 | 0 | 1 | 0 |
| Seq ID 775 | 4 | 4 | 0 | 1 | 5 | 0 | 0 | 0 |
| Seq ID 777 | 3 | 4 | 0 | 2 | 2 | 0 | 2 | 0 |
| Seq ID 779 | 5 | 2 | 0 | 4 | 0 | 2 | 0 | 0 |
| Seq ID 793 | 3 | 3 | 0 | 1 | 4 | 0 | 0 | 1 |
| Seq ID 821 | 4 | 4 | 1 | 3 | 2 | 0 | 0 | 0 |
| Seq ID 825 | 3 | 3 | 0 | 1 | 3 | 2 | 0 | 0 |
| Seq ID 878 | 3 | 3 | 1 | 1 | 3 | 0 | 1 | 0 |
| Seq ID 983 | 3 | 3 | 0 | 1 | 3 | 2 | 0 | 0 |

TABLE 11
Fold Expression for SEQ ID 142

| | Sample 1 | Sample 2 | Sample 3 | Sample 4 | Sample 5 | Sample 6 | Sample 7 | Sample 8 | Sample 9 | Sample 10 |
|---|---|---|---|---|---|---|---|---|---|---|
| Fold expression | 3.49 | 2.7 | 6.72 | 2.93 | 4.93 | 10.31 | 6.84 | 4.16 | 2.7 | 4.27 |

The application's sequence listing, which the Patent Office published only in electronic form, follows.

SEQUENCE LISTING (3462 sequences)

SEQ ID NO: 1 - DNA, 255 bp, Homo sapiens
cagaagaacctgaggttgatctaccagcgtttcgtttggagtgggaccccagagactaggaaacgtaaagcaaagtcatgcatctgtcacgtatgtagtacccatatgaacagactccactcttgtctctcctgtgtcttttttggctgcttcactgagaaacatattcacaaacatgcagaaacaaagcagcaccatttagctgtagacctttatcatggggtcatatattgcttcatgtgtaaggattatgta

SEQ ID NO: 2 - DNA, 255 bp, Homo sapiens
atgaaccagtatacagaaatagaaacctgtgtggagtgttcagcgaaaaacctgaagaacatatcagagctcttttattacgcacagaaagctgttcttcatcctacagggcccctgtactgcccagaggagaaggagatgaaaccagcttgtataaaagcccttactcgtatatttaaaatatctgatcaagataatgatggtactctcaatgatgctgaactcaacttctttcagaggatttgtttcaacact

SEQ ID NO: 3 - DNA, 255 bp, Homo sapiens
atgctgcgtgggacgatgacggcgtggagaggaatgaggcctgaggtcacactggcttgcctcctcctagccacagcaggctgctttgctgacttgaacgaggtccctcaggtcaccgtccagcctgcgtccaccgtccagaagcccggaggcactgtgatcttgggctgcgtggtggaacctccaaggatgaatgtaacctggcgcctgaatggaaaggagctgaatggctcggatgatgctctgggtgtcctc

SEQ ID NO: 4 - DNA, 255 bp, Homo sapiens
atgcgcggcctcgggctctggctgctgggcgcgatgatgctgcctgcgattgcccccagccggccctgggccctcatggagcagtatgaggtcgtgttgccgtggcgtctgccaggcccccgagtccgccgagctctgccctcccacttgggagggcagttccggccccagccctgtccttacctcagcatccggggaacctactaccgacctgcccgctgccctgggctcatccagccggtggcacagctaagg

SEQ ID NO: 5 - DNA, 255 bp, Homo sapiens
gcggtggcggtggcggccgcgtcccggcggcagtcgtgctacctgtgtgacctgccccgcatgccctgggccatgatctgggacttcaccgaacccgtctgccgcggctgcgtcaactacgagggcgccgaccgcgtcgagttcgtcatcgagacggcgcggcagctcaagcgggcgcacggctgcttcccggagggtcgctccccacccggcgccgcggcctcggccgccgccaagccgccgccgctctccgcc

SEQ ID NO: 6 - DNA, 255 bp, Homo sapiens
atgttccccaccgagagcgcatggcttgggaagcgaggcgcgaacccggcccccgaagccgtccgggagacggtgatgctgttgctgtgcctgggggtcccgaccggccgcccctacaacgtggacactgagagcgcgctgctttaccagggcccccacaacacgctgttcggctactcggtcgtgctgcacagccacggggcgaaccgatggctcctagtgggtgcgcccactgccaactggctcgccaacgct

SEQ ID NO: 7 - DNA, 255 bp, Homo sapiens
atggtgaacctgaggaatgcggtgcattcattccttgtgcacctaattggcctattggtttggcaatgtgatatttctgtgagcccagtagcagctatagtaactgacattttcaatacctccgatggtggacgcttcaaattcccagacggggtacaaaactggccagcactttcaatcgtcatcataataatcatgacaataggtggcaacatccttgtgatcatggcagtaagcatggaaaagaaactgcac

SEQ ID NO: 8 - DNA, 255 bp, Homo sapiens
atggctcactctttcggggagagctaccgggtgggcagcacctctggcatccacgccatcaccgtcttctgctcctgggactacaaggtgacgcagaagcgggcctcccgcctccagcaggacaatattcgcacccggctgaaggagctgctggccgagtggcagctgcggcacagccccaggagcgtgtgcgggaggctgcggcaggcggctgtgctggggcttgtgtggctgctgtgtctggggaccgcgctg

SEQ ID NO: 9 - DNA, 255 bp, Homo sapiens
atgtctagactgggagccctgggtggtgcccgtgccgggctgggactgttgctgggtaccgccgccggccttggattcctgtgcctcctttacagccagcgatggaaacggacccagcgtcatggccgcagccagagcctgcccaactccctggactatacgcagacttcagatcccggacgccacgtgatgctcctgcgggctgtcccaggtggggctggagatgcctcagtgctgcccagccttccacgggaa

SEQ ID NO: 10 - DNA, 255 bp, Homo sapiens
gcactcactgtgggcctcgtgcgacagtgtcaaacaatccatggacgagaccggacgtgcatccctccccggcttcccccggagtgggtcaccacactgttttttatcatcatgggaatcatttcattgactgtcacatgtggtttgctggtggcttcccactggcgaagagaagctacaaaatatgctcgatggatagcattcactggaaggcaagcttcgctgctgagttgcttggaggagcttggagaaacc

SEQ ID NO: 11 - DNA, 255 bp, Homo sapiens
atgcccgtggccgaggccccccaggtggctggcgggcagggggacggaggtgatggcgaggaagcggagccggaggggatgttcaaggcctgtgaggactccaagagaaaagcccggggctacctccgcctggtgcccctgtttgtgctgctggccctgctcgtgctggcttcggcgggggtgctactctggtatttcctagggtacaaggcggaggtgatggtcagccaggtgtactcaggcagtctgcgtgta

SEQ ID NO: 12 - DNA, 255 bp, Homo sapiens
atggcgcccaccctggccactgcccatcggcgccgctggtggatggcctgcacggccctggagaacctcctcttctcggcagtcctcctgggctggggctcgctgctcatcatgctcaagtcagagggcttttactcctacctgtgtaccgagccagagccggggcacgaggaggtgagctggatgaacggctggctcagctgccaggcccaggacgagatgctaaatttggccttcactgtgggctcctttctg

SEQ ID NO: 13 - DNA, 255 bp, Homo sapiens
atggggcagcgcctgagtggcggcagatcttgcctcgatgtccccggccggctcctaccgcagccgccgccgcccccgccgccggtgaggaggaagctcgcgctgctcttcgccatgctctgcgtctggctctatatgttcctgtactcgtgcgccggctcctgcgccgccgcgccggggctgctgctcctgggctctgggtcccgcgccgcacacgacccgccagccctggccacagctccggacgggacgccc

SEQ ID NO: 14 - DNA, 696 bp, Homo sapiens
atggggcccttggcgctgcccgcctggctgcagcccaggtataggaagaatgcgtatcttttcatctattacttaatccagttctgtggccactcttggatatttacaaatatgacagtcagattcttttcatttggaaaagattcaatggttgacactttttatgctattggacttgtgatgcgactttgccaatccgtatctctcctggaactgctgcacatatatgttggcattgagtcaaaccatcttctcccaaggtttttgcagctcacagaaagaataatcatcctttttgtggtgatcaccagtcaagaggaagtccaagagaaatatgtggtgtgtgttttattcgtcttttggaatctattggatatggttaggtacacttatagcatgttatcagtcataggaatatcctatgctgtcttgacatggctcagtcaaacactatggatgccaatttatcctttgtgtgttcttgctgaagcatttgccatctatcaatcgctgccttattttgaatcatttggcacttattccaccaagctgccctttgacttatccatctatttcccatatgtgctgaaaatatatctcatgatgctctttataggtatgtattttacctacagtcatctatactcagaaagaagagacatcctcggaatctttcccattaaaaaaaagaagatg

SEQ ID NO: 15 - DNA, 864 bp, Homo sapiens
atgcaacggagatcaagagggataaatactggacttattctactcctttctcaaatcttccatgttgggatcaacaatattccacctgtcaccctagcaactttggccctcaacatctggttcttcttgaaccctcagaagccactgtatagctcctgccttagtgtggagaagtgttaccagcaaaaagactggcagcgtttactgctctctccccttcaccatgctgatgattggcatttgtatttcaatatggcatccatgctctggaaaggaataaatctagaaagaagactgggaagtagatggtttgcctatgttatcaccgcattttctgtacttactggagtggtatacctgctcttgcaatttgctgttgccgaatttatggatgaacctgacttcaaaaggagctgtgctgtaggtttctcaggagttttgtttgctttgaaagttcttaacaaccattattgccctggaggctttgtcaacattttgggctttcctgtaccgaacagatttgcttgttgggtcgaacttgtggctattcatttattctcaccagggacttccttcgctgggcatctggctgggattcttgttggactaatgtacactcaagggcctctgaagaaaatcatggaagcatgtgcaggcggtttttcctccagtgttggttacccaggacggcaatactactttaatagttcaggcagctctggatatcaggattattatccgcatggcaggccagatcactatgaagaagcacccaggaactatgacacgtacacagcaggactgagtgaagaagaacagctcgagagagcattacaagccagcctctgggaccgaggtaggagt

SEQ ID NO: 16 - DNA, 255 bp, Homo sapiens
atgactgagaaaatgtccagcttcctctacataggggacatcgtgtccctgtacgcggagggctcggtcaacggcttcatcagcaccttggggttagtggatgacagatgtgtggtgcacccagaggccggggaccttgccaaccctcccaagaagttcagagactgccttttcaaggtgtgccctatgaacagatattctgcccagaagcaatattggaaagcaaagcaagccaaacaagggaaccacaccgag

SEQ ID NO: 17 - DNA, 732 bp, Homo sapiens
gtctttgatgaagttgatacagatcaatctggtgtcttgtctgacagagaaatccgaacactggctaccagaattcacgaactgccgttaagtttgcaggatttgacaggtctggaacacatgctaataaattgctcaaaaatgcttcctgctgatatcacgcagctaaataatattccaccaactcaggaatcctactatgatcccaacctgccaccggtcactaaaagtctagtaacaaactgtaaaccagtaactgacaaaatccacaaagcatataaggacaaaaacaaatataggtttgaaatcatgggagaagaagaaatcgcttttaaaatgattcgtaccaacgtttctcatgtggttggccagttggatgacataagaaaaaaccctaggaagtttgtttgcctgaatgacaacattgaccacaatcataaagatgctcagacagtgaaggctgttctcagggacttctatgaatccatgttccccataccttcccaatttgaactgccaagagagtatcgaaaccgtttccttcatatgcatgagctgcaggaatggagggcttatcgagacaaattgaagttttggacccattgtgtactagcaacattgattatgtttactatattctcattttttgctgagcagttaattgcacttaagcggaagatatttcccagaaggaggatacacaaagaagctagtcccaatcgaatcagagta

SEQ ID NO: 18 - DNA, 255 bp, Homo sapiens
ttagatccttctgcggatacatgggacctcttctcacctttaatatcattatggataaacaggttttacatttatttgggctttgctgttagcattagcctttggatttgtgtccagattgtcatcaagacgcagggcaagaacttacaggaaaaatctgttccaaaagcagctcaggatttgatgacaaatggttatgtctcccttcaagagaaagacatctttgtgtctggagtgaagattttttatggttct

SEQ ID NO: 19 - DNA, 255 bp, Homo sapiens
atggcggaacgcaggagacacaagaagcggatccaggaagttggtgaaccatctaaagaagagaaggctgtggccaagtatcttcgattcaactgtccaacaaagtccaccaatatgatgggtcaccgggttgattattttattgcttcaaaagcagtggactgtcttttggattcaaagtgggcaaaggccaagaaaggagaggaagctttatttacaaccagggagtctgtggttgactactgcaacaggctt

SEQ ID NO: 20 - DNA, 255 bp, Homo sapiens
atggaaacagaggctattgatggctatataacgtgtgacaatgagctttcacccgaaagggagcactccaatatggcaattgacctcacctcaagcacacccaatggacagcatgcctcaccaagtcacatgacaagcacaaattcagtaaagctagaaatgcagagtgatgaagagtgtgacaggaaacccctgagccgtgaagatgagatcaggggccatgatgagggtagcagcctagaagaacccctaatt

SEQ ID NO: 21 - DNA, 255 bp, Homo sapiens
atggccctcgtactcggctccctgttgctgctggggctgtgcgggaactccttttcaggagggcagccttcatccacagatgctcctaaggcttggaattatgaattgcctgcaacaaattatgagacccaagactcccataaagctggacccattggcattctctttgaactagtgcatatctttctctatgtggtacagccgcgtgatttcccagaagatactttgagaaaattcttacagaaggcatatgaa

SEQ ID NO: 22 - DNA, 621 bp, Homo sapiens
cccgtctataccattgggctgcccccttcagacctccgggcaggaaaagaagagactgtactggtcagagaaagacatcagcaggagagccagagattcctcctcctctccatcatcaccatcaccattattctcatcaccatcaccgtcaccgtcatcatcatcatcaccatcatggacttcaaagaagttcaaagaatttcctcctctggccagagtgaatcctgttctgtggaagcaggaggctggggaggtgtctccccttctaggaaatgtggcctcctgggcagccaatcccacaggatgtgctccgtcagagcagcaaaagcggggacagagggaattatcaaggccatgacccgagggtggggcacggtcagcccctgctttgagctaagacctctgtccagcgcccggacccaggtgagccccacagtccctgtcccgaaagagctgagagcctgctggggaaacagtcctagaaacacctcgctagcacccagtgtggacccagaggaaggggctcctaggagaagtggcccagggcccaactcggaaggaagcagccttcagaatcagccgctggagctgcgggactcgcccacggccctcaggactccc

SEQ ID NO: 23 - DNA, 255 bp, Homo sapiens
atggagcggcgctggcccctggggctagggctggtgctgctgctctgcgccccgctgcccccgggggcgcgcgccaaggaagttactctgatggacacaagcaaggcacagggagagctgggctggctgctggatcccccaaaagatgggtggagtgaacagcaacagatactgaatgggacacccctgtacatgtaccaggactgcccaatgcaaggacgcagagacactgaccactggcttcgctccaattgg

SEQ ID NO: 24 - DNA, 255 bp, Homo sapiens
atgacagtcgtagggaaccctcgaagttggagctgccagtggttgccaatcctgatactgttgctgggcacaggccatgggccaggggtggaaggcgtgacacactacaaggccggcgaccctgttattctgtatgtcaacaaagtgggaccctaccataaccctcaggaaacttaccactactatcagcttccagtctgctgccctgagaagatacgtcacaaaagccttagcctgggtgaagtgctggatggg

SEQ ID NO: 25 - DNA, 255 bp, Homo sapiens
agggccgctgccctcctgccgtcgagatcgccgccgacgccgctgctgtggccgctgctgctgctgctgctcctggaaaccggagcccaggatgtgcgagttcaagtgctacccgaggtgcgaggccagctcgggggcaccgtggagctgccgtgccacctgctgccacctgttcctggactgtacatctccctggtgacctggcagcgcccagatgcacctgcgaaccaccagaatgtggccgccttccaccct

SEQ ID NO: 26 - DNA, 255 bp, Homo sapiens
atggcccgggccgctgccctcctgccgtcgagatcgccgccgacgccgctgctgtggccgctgctgctgctgctgctcctggaaaccggagcccaggatgtgcgagttcaagtgctacccgaggtgcgaggccagctcgggggcaccgtggagctgccgtgccacctgctgccacctgttcctggactgtacatctccctggtgacctggcagcgcccagatgcacctgcgaaccaccagaatgtggccgccttc

SEQ ID NO: 27 - DNA, 255 bp, Homo sapiens
atggcgctgctcgcgatgcattcttggcgctgggcggccgcggcggctgctttcgaaaagcgccggcactccgcgattctgatccggcctttagtctctgttagcggctcaggtccgcagtggaggccacatcaactcggcgccttgggaaccgctcgagcctaccagattccagagtcattaaaaagtatcacatggcagagattgggaaaaggcaattcaggacagttcttagatgctgcaaaggctctccag

SEQ ID NO: 28 - DNA, 183 bp, Homo sapiens
atgccgatggatttgattttagttgtgtggttctgtgtgtgcactgccaggacagtggtgggctttgggatggaccctgaccttcagatggatatcgtcaccgagcttgaccttgtgaacaccacccttggagttgctcaggtgtctggaatgcacaatgccagcaaagcatttttatttcaa

SEQ ID NO: 29 - DNA, 621 bp, Homo sapiens
atgtgtggcaggttcctgaggtggtggctgctggcggaggagagctggcactccacccccgtggggcgcctcctgtttcccgtgctcctgggattccgccttgtgctgctggctgccagtgggcctggagtctatggcgatgagcagagtgaattcgtgtgtcacacccagcagccgggctgcaaggctgcctgcttcgatgccttccacccgctctccccgctgcgtttctgggtcttccaggtcatcttggtggctgtacctagcgtcctctacatgggtttcactctgtatcacctgggagctcagctggtcctggaggggacagcgccggggttgcagtaccacctgtatgggttccagatgcccagctcctttgcatgtggccaagagccttgcccgtatagattaacttgcaccttttcccacccctcggagaagatcatctttctaaaagccatgtttggggtcagtgggttccgtctcttgttcactcttttggagattgtgcttctgggtctgggaagactgtgtaagcccctgcggaacttcctgggtggggcctcttcctccagccacgccctggccctgagcagcaaaaggaacctccagcagacactg

SEQ ID NO: 30 - DNA, 771 bp, Homo sapiens
atgtgtggcaggttcctgcggcggctgctggcggaggagagccggcgctccacccccgtggggcgcctcttgcttcccgtgctcctgggattccgccttgtgctgctggctgccagtgggcctggagtctatggtgatgagcagagtgaattcgtgtgtcacacccagcagccgggctgcaaggctgcctgcttcgatgccttccaccccctctccccgctgcgtttctgggtcttccaggtcatcttggtggctgtacccagcgccctctatatgggtttcactctgtatcacgtgatctggcactgggaattatcaggaaaggggaaggaggaggagaccctgatccagggacgggagggcaacacagatgtcccaggggctggaagcctcaggctgctctgggcttatgtggctcagctgggggctcggcttgtcctggagggggcagccctggggttgcagtaccacctgtatgggttccagatgcccagctcctttgcatgtcgccgagaaccttgccttggtagtataacctgcaatctgtcccgcccctctgagaagaccattttcctaaagaccatgtttggagtcagcggtttctgtctcttgtttacttttttggagcttgtgcttctgggtttggggagatggtggaggacctggaagcacaaatcttcctcttctaaatacttcctaacttcagagagcaccagaagacacaagaaagcaaccgatagcctcccagtggtggaaaccaaagagcaattt

SEQ ID NO: 31 - DNA, 255 bp, Homo sapiens
atggagtttgtgcgggcgctgtggctgggcctggcgctggcgctggggccggggtccgcggggggccaccctcagccgtgcggcgtcctggcgcgcctcgggggctccgtgcgcctgggcgccctcctgccccgcgcgcctctcgcccgcgcccgcgcccgcgccgccctggcccgggccgccctggcgccgcggctgccgcacaacctgagcttggagctggtggtcgccgcgccccccgcccgcgaccccgcc

SEQ ID NO: 32 - DNA, 645 bp, Homo sapiens
atgccgttccacccggtgacggcggcgttgatgtaccggggcatctacaccgtgcccaacctgctgtcggagcagcgcccggtggacatcccggaggacgagctggaggagatccgagaggccttcaaggtgtttgaccgtgacggcaatggcttcatctccaagcaggagctgggcacagccatgcgctcactgggttacatgcccaacgaggtggagctggaggtcatcatccagcggctggacatggatggtgatggtcaagtggactttgaggagtttgtgacccttctgggacccaaactctccacctcagggatcccagagaagttccatggcaccgactttgatactgtcttctggaagtgcgacatgcagaagctgacggtggatgagctgaagcggctgctctacgacaccttctgcgagcacctgtccatgaaggacatagagaacatcatcatgacggaggaggagagccacctgggcacagccgaggagtgtcccgtggatgtggagacctgctccaaccagcagatccgccagacttgcgtgcgcaagagtctcatctgcgccttcgccatcgccttcatcatcagtgtcatgctcattgcggccaaccaggtgctgcgcagtggcatgaag

SEQ ID NO: 33 - DNA, 885 bp, Homo sapiens
gtgactgaatttctcttattgggcctcacagatcatccctatcagaagattgttctcttcttcatgtttctctttgtttatcttatcaccctgggaggaaacatgaccttggttatcttaatccgaactgattcccacttgcatacacctatgtactttttcattggcaatctgtcttttttggatttctggtatacctctgtgtatacccccaaaatcctggccagttgtgtctcagaagataagcgcatttccttggctggatgtggggctcagctgtttttttcctgtgttgtagcctacactgaatgctatctcctggcagccatggcatatgaccgccatgcagcaatttgtaacccattgctttattcaggtaccatgtccaccgccctctgtactgggcttgttgctggctcctacataggaggatttttgaatgccatagcccatactgccaatacattccgcctgcatttttgtggtaaaaatatcattgaccactttttctgtgatgcaccaccattggtaaaaatgtcctgtacaaacaccagggtctacgaaaaagtcctgcttggtgtggtgggcttcacagtactctccagcattcttgctatcctgatttcctatgtcaacatcctcctggctatcctgagaatccactcagcttcaggaagacacaaggcattctccacctgtgcttcccacctcatctcagtcatgctcttctatggatcattgttgtttatgtattcaaggcctagttccacctactccctagagagggacaaagtagctgctctgttctacaccgtgatcaacccactgctcaaccctctcatctatagcctgagaaacaaagatatcaaagaggccttcaggaaa

SEQ ID NO: 34 - DNA, 648 bp, Homo sapiens
tttgtggacacctgcttctcctcagttgtgagccccaagatgctcactgacttctttgtgaagaggaaagccatttctttccttggctgtgctttgcagcagtggttctttgggttctttgtggcagcagactgtttcctcttggagtccatggcctatgactgctatgtggccatctgtaacccattgttatactcagttgctatgtcccagaggctctgcatccagctagtggtgggtccctatgtcattggactcatgaataccatgactcacacaacaaatgcattttgtctccctttttgtggccctaatgtcatcaatcctttcttctgtgatatgtcccccttactttcccttgtatgtgctgataccaggctcaataagttggcagttttcatcgtggctggagctgtgggagtcttcagtggtctgactatcctgatttcctacatttacatcctcatggccatcctgaggatccgctctgctgatgggaggtgcaaaaccttttctacttgctcttctcacctgacagctgttttcatctcgtatggtacccttttctttatttatgtacatcccagtgcaaccttctccctggatctcaataaagtagtgtctgtgttttacacagcagtgattcct

SEQ ID NO: 35 - DNA, 255 bp, Homo sapiens
atgaaagtgttactcagacttatttgtttcatagctctactgatttcttctctggaggctgataaatgcaaggaacgtgaagaaaaaataattttagtgtcatctgcaaatgaaattgatgttcgtccctgtcctcttaacccaaatgaacacaaaggcactataacttggtataaagatgacagcaagacacctgtatctacagaacaagcctccaggattcatcaacacaaagagaaactttggtttgttcct

SEQ ID NO: 36 - DNA, 741 bp, Homo sapiens
atggttgctgggagcgacgcggggcgggccctgggggtcctcagcgtggtctgcctgctgcactgctttggtttcatcagctgtttttcccaacaaatatatggtgttgtgtatgggaatgtaactttccatgtaccaagcaatgtgcctttaaaagaggtcctatggaaaaaacaaaaggataaagttgcagaactggaaaattctgaattcagagctttctcatcttttaaaaatagggtttatttagacactgtgtcaggtagcctcactatctacaacttaacatcatcagatgaagatgagtatgaaatggaatcgccaaatattactgataccatgaagttctttctttatgtgcttgagtctcttccatctcccacactaacttgtgcattgactaatggaagcattgaagtccaatgcatgataccagagcattacaacagccatcgaggacttataatgtactcatgggattgtcctatggagcaatgtaaacgtaactcaaccagtatatattttaagatggaaaatgatcttccacaaaaaatacagtgtactcttagcaatccattatttaatacaacatcatcaatcattttgacaacctgtatcccaagcagcggtcattcaagacacagatatgcacttatacccataccattagcagtaattacaacatgtattgtgctgtatatgaatggtattctgaaatgtgacagaaaaccagacagaacc

SEQ ID NO: 37 - DNA, 255 bp, Homo sapiens
atggcggcggcagcagcttcggcgcctcagcagctctcggatgaggagcttttctctcagctccgccgttacggcctgtctcccggaccagtgacggagagcacccgcccggtctacctcaagaagctgaagaagcttcgagaggaagagcagcaacagcaccggtcagggggccgcggcaacaagacgcggaacagtaataacaataacacggcagccgccacggtcgcagccgcgggaccagcggcggcggcg

SEQ ID NO: 38 - DNA, 252 bp, Homo sapiens
atggttttagcttcctttactcaaaatatgaacattaagtgttgtgaatttgtctgccaagtggttcagaaatacattataaataacctagttaaaaaaagaaactgtgaaccatcttggtcagtctattctattctatgtttatatgttattttctcaagcaatcgcttcataattatagggtttacaaaaaggtcgagaaagaaaagcgaaggcgaaatagcctctactgcattacaagcaacatcagga

SEQ ID NO: 39 - DNA, 255 bp, Homo sapiens
ctgcagaacgtgcgcatcgaccccagtagcctgtccttcaacatgtggaaggagatccctatccccttctatctctccgtctacttctttgacgtcatgaaccccagcgagatcctgaagggcgagaagccgccagtgcgggagcgcgggccctacgtgtacagggagttcaggcacaaaagcaacatcaccttcaacaacaacgacaccgtgtccttcctcgagtaccgcaccttccagttccagccctccaag

SEQ ID NO: 40 - DNA, 255 bp, Homo sapiens
gaaatggggggaaatcagacttccatcacagagttcctcctactgggatttcccattggcccaaggattcagatgctcctctttgggctcttctccctgttctacatcttcattctgttggggaacgggacaatcctggggctcatctcactggactccagactccacacccccatgtacttcttcctctcacacctggcggtcgtcgacatcgcctgtgcttgcagcacggtgccccagatgctggtgaacctc

SEQ ID NO: 41 - DNA, 894 bp, Homo sapiens
actaacatctcaagtactaccagcttcactctaacaggcttccctgagatgaagggtctggagcactggctggctgcccttctgctgctgctttatgctatttccttcctgggcaacatcctcatcctctttatcataaaggaagagcagagcttgcaccagccaatgtactacttcctgtctcttttttctgttaatgacctgggtgtgtccttttctacattgcccactgtactggctgctgtagttgactttgatggctgcctggcccagatgttcttcattcacaccttctcctgcatggagtcaggggtcctactagccatgagctatgaccgctttgtagccatctacaacctcctgcgctatacagccatcctgaccctgccccgtattatctgcatgggtctgggcattacactgaagagtgtggcactcatggccccacttccaatccttttgaggcaactgccctattgccacactaatgtcctctcacactcctactgcctccactcagatctgatccagctgccttgtgcagatactaaactcaacagcatcctgggcttagccattgttctcgcaaatttcgggctggactcattgcttatcgtggtctcttatgtcttgattctttatacagtgatgggcattgcttctggagagggacggtggaaggctctcaacacatgtgtgtcacatatttgtgcagtgcttatatattatgtgcccatgattggggtgtctgtgatgcatcgtgctgccaaacatgcttctcccattgtccacacacttatgtctagcatctgccttttggtgccacctgtacttaatcccatcatctatagtgttaagacccagacaataagacagggaattctcaccttgttt

SEQ ID NO: 42 - DNA, 255 bp, Homo sapiens
atgctgggtctcaatggcacccccttccagccagcaacactccagctgacaggcattcctgggatacaaacaggcctcacctgggttgccctgattttctgcatcctctacatgatctccattgtaggtaacctcagcattctcactctggtgttttgggagcctgctctgcatcagcccatgtactacttcctctctatgctcgctctcaatgatctgggagtgtccttttctacacttcccactgtgatttct

SEQ ID NO: 43 - DNA, 255 bp, Homo sapiens
atgtcgtccagcagcagctcccatcccttcctattgactggttttccaggcttggaggaagctcatcactggatttccgtatttttcttgttcatgtatatatccatcctttttggcaatggcaccctccttcttctcattaaggaagatcacaatcttcatgagcccatgtacttctttctggccatgctggctgccacagacctggggctggccctgaccacaatgcccacggtgctgggagtcctctggctg

SEQ ID NO: 44 - DNA, 255 bp, Homo sapiens
atgtcagtccaatattcgctcagtcctcaattcatgctgctatccaacattactcagtttagccccatattctatctcaccagctttcctggattggaaggcatcaaacactggattttcatcccctttttctttatgtacatggttgccatctcaggcaattgtttcattctgatcattattaagaccaaccctcgtctgcacacacccatgtactatctactatccttgctggccctcactgacctggggctg

SEQ ID NO: 45 - DNA, 282 bp, Homo sapiens
atgttgaggcaccagaagttgttactgttttctgttacgctttacctcttgactacagcattgcccccttatagaagaaatggacagacttctgaatcttacaggtttcttcctccagtcacatctcatgatttgttatgggtaaattgctttctttacatttttgtttccccatcaaaatctcacatcttactatacttaaaggacaaatatgttttgaagcatttaaagtattccccttttgggggttgctcttttagttggaaaactaagcaactgagg

SEQ ID NO: 46 - DNA, 657 bp, Homo sapiens
atgggcatgagtagcttgaaactgctgaagtatgtcctgtttttcttcaacttgctcttttggatctgtggctgctgcattttgggctttgggatctacctgctgatccacaacaacttcggagtgctcttccataacctcccctccctcacgctgggcaatgtgtttgtcatcgtgggctctattatcatggtagttgccttcctgggctgcatgggctctatcaaggaaaacaagtgtctgcttatgtcgttcttcatcctgctgctgattatcctccttgctgaggtgaccttggccatcctgctctttgtatatgaacagaagctgaatgagtatgtggctaagggtctgaccgacagcatccaccgttaccactcagacaatagcaccaaggcagcgtgggactccatccagtcatttctgcagtgttgtggtataaatggcacgagtgattggaccagtggcccaccagcatcttgcccctcagatcgaaaagtggagggttgctatgcgaaagcaagactgtggtttcattccaatttcctgtatatcggaatcatcaccatctgtgtatgtgtgattgaggtgttggggatgtcctttgcactgaccctgaactgccagattgacaaaaccagccagaccatagggcta

SEQ ID NO: 47 - DNA, 255 bp, Homo sapiens
atggccgacggcggcggccctaaggacgcgccaagcctgcggagctctcccgggccggcgccgcgggtcccgcgcgcggtcgggccgagtggcggtggcggggagaccccgcggaccgcggcgctggcgctgcgcttcgacaagcccattaagcaggccttctacaacaccggggccgtgctgttcgtgtgcctgtgctgcggcgccgcggtgctggtctacttcatcctggaggccttcctgcggccgctgctc

SEQ ID NO: 48 - DNA, 255 bp, Homo sapiens
cttgtgacaggagcaggagggtttctgggacagaggatcatccgcctcttggtgaaggagaaggagctgaaggagatcagggtcttggacaaggccttcggaccagaattgagagaggaattttctaaactccagaacaagaccaagctgacagtgctggaaggagacattctggatgagccattcctgaagagagcctgccaggacgtctcggtcatcatccacaccgcctgtatcattgatgtcttcggtgtc

SEQ ID NO: 49 - DNA, 255 bp, Homo sapiens
atggcagcgcgcccgctgcccgtgtcccccgcccgcgccctcctgctcgccctggccggtgctctgctcgcgccctgcgaggcccgaggggtgagcttatggaaccaaggaagagctgatgaagttgtcagtgcctctgttgggagtggggacctctggatcccagtgaagagcttcgactccaagaatcatccagaagtgctgaatattcgactacaacgggaaagcaaagaactgatcataaatctggaaaga

SEQ ID NO: 50 - DNA, 255 bp, Homo sapiens
atgaggttcacattccctctcatggctatagtcctggaaattgccatgattgttttatttggattatttgttgagtatgaaacggaccagactgttctcgagcagctcaacatcaccaagccaacagacatgggcatattctttgagttatatcctctgttccaagatgtacatgttatgatatttgttgggtttggcttcctcatgaccttcctgaagaaatatggcttcagcagtgtgggtatcaacctactc

SEQ ID NO: 51 - DNA, 831 bp, Homo sapiens
tttattgccaaaccctgtgcactctgtattggcatcgaggacagtggtccttatcaggcccaacccaatgccatccttgaaaaggtgttcatatctattaccaagtatcctgataagaaaaggctggagggcctgtcaaagcagctggattggaatgtccgaaaaatccaatgctggtttcgccatcggaggaatcaggacaagcccccaacgcttactaaattctgtgaaagcatgtggagattcacattttatttatgtatattctgctatggaattagatttctctggtcgtcaccttggttctgggacatccgacagtgctggcataactatccatttcagcctctttcaagtgggctttatcactattatatcatggaattggccttctattggtcccttatgttttctcagtttacagacattaaaagaaaggacttcctgatcatgtttgtgcatcacttggtcaccattgggcttatctccttctcctacatcaacaatatggttcgagtgggaactctgatcatgtgtctacatgatgtctcagacttcttgctggaggcagccaaactggccaattatgccaagtatcagcggctctgtgacaccctttttgtgatcttcagtgctgtttttatggttacacgactaggaatctatccattctggattctgaacacgaccctctttgagagttgggagataatcgggccttatgcttcatggtggctcctcaatggcctgctgctgaccctacagcttctgcatgtcatctggtcctacctaattgcacggattgctttgaaagccttgatcaggggaaag

SEQ ID NO: 52 - DNA, 888 bp, Homo sapiens
atgacagatgccgctgtgtccttcgccaaggacttcctggcaggtggagtggccgcagccatctccaagacggcggtagcgcccatcgagcgggtcaagctgctgctgcaggtgcagcatgccagcaagcagatcactgcagataagcaatacaaaggcattatagactgcgtggtccgtattcccaaggagcagggagttctgtccttctggcgcggtaacctggccaatgtcatcagatacttccccacccaggctcttaacttcgccttcaaagataaatacaagcagatcttcctgggtggtgtggacaagagaacccagttttggctctactttgcagggaatctggcatcgggtggtgccgcaggggccacatccctgtgttttgtgtaccctcttgattttgcccgtacccgtctagcagctgatgtgggtaaagctggagctgaaagggaattccgaggcctcggtgactgcctggttaagatctacaaatctgatgggattaagggcctgtaccaaggctttaacgtgtctgtgcagggtattatcatctaccgagccgcctacttcggtatctatgacactgcaaagggaatgcttccggatcccaagaacactcacatcgtcatcagctggatgatcgcacagactgtcactgctgttgccgggttgacttcctatccatttgacactgttcgccgccgcatgatgatgcagtcagggcgcaaaggaactgacatcatgtacacaggcacgcttgactgctggcggaagattgctcgtgatgaaggaggcaaagcttttttcaagggtgcatggtccaatgttctcagaggcatgggtggtgcttttgtgcttgtcttgtatgatgaaatcaagaag

SEQ ID NO: 53 - DNA, 513 bp, Homo sapiens
atgtcgcacggagccgggctcgtccgcaccacgtgcagcagcggcagcgcgctcggacccggggccggcgcggcccagcccagcgcgagccccttggaggggctgctggacctcagctacccccgcacccacgcggccctgctgaaagtggcgcaaatggtcaccctgctgattgccttcatctgtgtgcggagctccctgtggaccaactacagcgcctacagctactttgaagtggtcaccatttgcgacttgataatgatcctcgccttttacctggtccacctcttccgcttctaccgcgtgctcacctgtatcagctggcccctgtcggaacttctgcactatttaatcggtaccctgctcctcctcatcgcctccattgtggcagcttccaagagttacaaccagagcggactggtagccggagcgatctttggtttcatggccaccttcctctgcatggcaagcatatggctgtcctataagatctcgtgtgtaacccagtccaca

SEQ ID NO: 54 - DNA, 255 bp, Homo sapiens
atggacaagctgccgccgtccatgcgcaagcggctctacagcctcccgcagcaggtgggggccaaggcgtggatcatggacgaggaagaggacgccgaggaggagggggccgggggccgccaagaccccagccgcaggagcatccggctgcggccactgccctcgccctccccctcggcggccgcgggtggcacggagtcccggagctcggccctcggggcagcggacagcgaagggccggcccgcggcgcgggc

SEQ ID NO: 55 - DNA, 798 bp, Homo sapiens
atgcgtgtcacacttgctacaatagcctggatggtttcttttgtctccaattattcacacacagcaaatattttgccagatatcgaaaatgaagatttcatcaaagactgcgttcgaatccataacaagttccgatcagaggtgaaaccaacagccagtgatatgctatacatgacttgggacccagcactagcccaaattgcaaaagcatgggccagcaattgccagttttcacataatacacggctgaagccaccccacaagctgcacccaaacttcacttcactgggagagaacatctggactgggtctgtgcccattttttctgtgtcttccgccatcacaaactggtatgacgaaatccaggactatgacttcaagactcggatatgcaaaaaagtctgtggccactacactcaggttgtttgggcagatagttacaaagttggctgcgcagttcaattttgccctaaagtttctggctttgacgctctttccaatggagcacattttatatgcaactacggaccaggagggaattacccaacttggccatataagagaggagccacctgcagtgcctgccccaataatgacaagtgtttggacaatctctgtgttaaccgacagcgagaccaagtcaaacgttactactctgttgtatatccaggctggcccatatatccacgtaacagatacacttctctctttctcattgttaattcagtaattctaatactgtctgttataattaccattttggtacagcacaagtaccctaatttagttcttttggac

SEQ ID NO: 56 - DNA, 255 bp, Homo sapiens
tctgtccccttacgcaagagcctctgctcccccactttcctgtggagcctcctcaccatgggcatgacccagctgcggatcatcttctacatggctgctgtgaacaagatgctggagtaccttgtgactggtggccaggagcatgagacaaatgaacagcaacaaaaggtggcagagacagttgggttctactcctccgtcttcggggccatgcagctgttgtgccttctcacctgccccctcattggctacatc

SEQ ID NO: 57 - DNA, 255 bp, Homo sapiens
atggagagggggctgccgctcctctgcgccgtgctcgccctcgtcctcgccccggccggcgcttttcgcaacgataaatgtggcgatactataaaaattgaaagccccgggtaccttacatctcctggttatcctcattcttatcacccaagtgaaaaatgcgaatggctgattcaggctccggacccataccagagaattatgatcaacttcaaccctcacttcgatttggaggacagagactgcaagtatgac

SEQ ID NO: 58 - DNA, 288 bp, Homo sapiens
atgaaattatatttatttcagtgggcacttttccattttaccactgtaccattatttggttcctggagttatacactaattttcagtatattactgttaaattaccaacacaaggcaatttatttgaaagattccgtttatcctgccattgctttgaaaagcagcaggaaacgaaatcctttgacttgtatcagcttctgcagagcatctttgttttcctttgtcctttgtttcctaccttttgaatcagattccgttttagtcaggaagacttcttgggaccattct

SEQ ID NO: 59 - DNA, 255 bp, Homo sapiens
gttggacgtgataagtatgagcctgcagctgtttcagaacaaggtgataaaaagggcaaaaagggcaaaaaagacagggacatggatgaactgaagaaagaagtttctatggatgatcataaacttagccttgatgaacttcatcgtaaatatggaacagacttgagccggggattaacatctgctcgtgcagctgagatcctggcgcgagatggtcccaacgccctcactccccctcccactactcctgaatgg

SEQ ID NO: 60 - DNA, 255 bp, Homo sapiens
atgaagaacatttactgtcttattccgaagcttgtcaattttgcaactcttggctgcctatggatttctgtggtgcagtgtacagttttaaatagctgcctaaagtcgtgtgtaactaatctgggccagcagcttgaccttggcacaccacataatctgagtgaaccgtgtatccaaggatgtcacttttggaactctgtagatcagaaaaactgtgctttaaagtgtcgggagtcgtgtgaggttggctgtagc

SEQ ID NO: 61 - DNA, 255 bp, Homo sapiens
atgccgcccgccgcgcccgcccgcctggcgctggccctgggcctgggcctgtggctcggggcgctggcggggggccccgggcgcggctgcgggccctgcgagcccccctgcctctgcggcccagcgcccggcgccgcctgccgcgtcaactgctcgggccgcgggctgcggacgctcggtcccgcgctgcgcatccccgcggacgccacagcgctagacgtctcccacaacctgctccgggcgctggacgttggg

SEQ ID NO: 62 - DNA, 582 bp, Homo sapiens
gggcagatcgagtgggccatgtgggccaacgaacaggcgctggcgtccggcctgatcctcatcaccgggggcatcgtggccacagctgggcgcttcacccagtggtactttggtgcctactccattgtggcgggcgtgtttgtgtgcctgctggagtacccccgggggaagaggaagaagggctccaccatggagcgctggggacagaagtacatgaccgccgtggtgaagctgttcgggccctttaccaggaattactatgttcgggccgtcctgcatctcctgctctcggtgcccgccggcttcctgctggccaccatccttgggaccgcctgcctggccattgcgagcggcatctacctactggcggctgtgcgtggcgagcagtggacgcccatcgagcccaagccccgggagcggccgcagatcggaggcaccatcaagcagccgcccagcaaccccccgccgcggcccccggccgaggcccgcaagaagcccagcgaggaggaggctgcggtggcggcggggggacccccgggaggtccccaggtcaaccccatcccggtgaccgacgaggtcgtg

SEQ ID NO: 63 - DNA, 810 bp, Homo sapiens
atggcgggcgccgagaactggccgggccagcagctggagctggacgaggacgaggcgtcttgttgccgctggggcgcgcagcacgccggggcccgcgagctggctgcgctctactcgccaggcaagcgcctccaggagtggtgctctgtgatcctgtgcttcagcctcatcgcccacaacctggtccatctcctgctgctggcccgctgggaggacacacccctcgtcatactcggtgttgttgcaggggctctcattgctgacttcttgtctggcctggtacactggggtgctgacacatggggctctgtggagctgcccattgtggggaaggctttcatccgacccttccgggagcaccacattgacccgacagctatcacacggcacgacttcatcgagaccaacggggacaactgcctggtgacactgctgccgctgctaaacatggcctacaagttccgcacccacagccctgaagccctggagcagctatacccctgggagtgcttcgtcttctgcctgatcatcttcggcaccttcaccaaccagatccacaagtggtcgcacacgtactttgggctgccacgctgggtcaccctcctgcaggactggcatgtcatcctgccacgtaaacaccatcgcatccaccacgtctcaccccacgagacctacttctgcatcaccacaggctggctcaactaccctctggagaagataggcttctggcgacgcctggaggacctcatccagggcctgacgggcgagaagcctcgggcagatgacatgaaatgggcccagaagatcaaa

SEQ ID NO: 64 - DNA, 255 bp, Homo sapiens
atggcggctctggcctacaacctgggcaagcgggagatcaaccactacttcagcgtgaggagcgccaaggtgctggcgctggtggccgtgctgctgctcgcagcgtgccacctcgcctcccgccgctaccgaggcaatgattcgtgtgaataccttctctcaagtggcagatttcttggagagaaagtttggcaacctcacagttgtatgatgcataaatacaaaatcagtgaagcaaagaactgccttgtagat

SEQ ID NO: 65 - DNA, 333 bp, Homo sapiens
atgccctccccagggaccgtctgcagcctcctgctcctcggcatgctctggctggacttggccatggcaggctccagcttcctgagccctgaacaccagagagtccagcagagaaaggagtcgaagaagccaccagccaagctgcagccccgagctctagcaggctggctccgcccggaagatggaggtcaagcagaaggggcagaggatgaactggaagtccggttcaacgccccctttgatgttggaatcaagctgtcaggggttcagtaccagcagcacagccaggccctggggaagtttcttcaggacatcctctgggaagaggccaaa

SEQ ID NO: 66 - DNA, 882 bp, Homo sapiens
atgcagggccccgccgggaacgcgagccggggactgccaggcgggccgccctccacagtcgcgtccggggcgggccgctgcgagagcggcgcgctcatgcacagcttcggcatcttcctgcaggggctgctcggcgtcgtggccttcagcacgttaatgctcaaacgcttcagagaaccaaagcatgaaagacgtccgtggaggatatggtttttagacacttccaaacaagccataggaatgctgttcatccactttgcaaatgtatacctagcagatctcactgaagaggacccttgttcactgtacctcatcaacttcctcctggacgccactgtgggcatgctgctcatctacgtgggggtgcgcgccgtcagcgtcctggtagagtggcagcagtgggagtccctgcgcttcggcgaatatggagaccctctgcagtgtggagcctgggtcgggcagtgcgctctttacatcgtgatcatgatttttgaaaagtctgtcgtcttcatcgtcctcctaatacttcagtggaaaaaggtggccctgttgaatcccattgaaaacccagacttgaagctggccatcgtcatgctgatcgtccccttctttgtcaacgctttgatgttttgggtagtggacaatttcctcatgagaaaggggaagacgaaagctaagctagaagaaaggggagccaaccaggactcgaggaatgggagcaaggtccgctaccggagggccgcatcccacgaggagtctgagtctgagatcctgatctcagcggatgatgagatggaggagtccgacgtggaggaggacctccgcagactgacccccctcaagcctgtgaagaaaaagaagcaccgctttgggctacccgta

SEQ ID NO: 67 - DNA, 255 bp, Homo sapiens
atggggccagaacggacaggggccgcgccgctgccgctgctgctggtgttagcgctcagtcaaggcattttaaattgttgtttggcctacaatgttggtctcccagaagcaaaaatattttccggtccttcaagtgaacagtttggctatgcagtgcagcagtttataaatccaaaaggcaactggttactggttggttcaccctggagtggctttcctgagaaccgaatgggagatgtgtataaatgtcctgtt

SEQ ID NO: 68 - DNA, 255 bp, Homo sapiens
atgtctgacaaaatgtctagcttcctacatattggagacatttgttctctgtacgcggagggatcgacaaatggatttattagcaccttgggcctggttgatgatcgttgtgttgtacagccagaaaccggggaccttaacaatccacctaagaaattcagagactgcctctttaagctatgtcccatgaaccgctactctgcccaaaagcagttctggaaagccgctaagcctggggccaacagcaccacagac

SEQ ID NO: 69 - DNA, 255 bp, Homo sapiens
agattcttagattacctctccgacctctgtgtctccatgaacaaatcaattccagtgacccaggaactgatatgtaaagctgtgctgaaccccaccaacgctgacatcctgattgagaccaagttggttctttctcgttttgaatttgaaggtgtctcttccactggagagaatgctctggaggcaggagaagacgaggaagaggtgtggctgttttggagggacagcaacaaagagattcgcagcaagagtgtg

SEQ ID NO: 70 - DNA, 372 bp, Homo sapiens
cccaggaggaccatgttgcgcggcaagtcccggctcaacgtggagtggctgggctactcgccaggcctgctcctcgagcacaggcccctcctggcagggcgcacgccgcggagccaccgccgaaatgaaagctcattagcatctacactgaagacgctcctgttcttcacagctttaatgatcactgttcctattgggttatatttcacaactaaatcttacatatttgaaggcgcccttgggatgtccaatagggacagctatttttacgctgctattgttgcagtggtcgccgtccatgtggtgctggccctctttgtgtatgtggcctggaatgaaggctcacgacagtggcgtgaaggcaaacaggat

SEQ ID NO: 71 - DNA, 255 bp, Homo sapiens
atgccgccggccacgggcggaggcctggcagagtccgagctgcgtccccggaggggccgctgtggcccccaggctgctagggccgcaggccgggacgtggccgctgaggctgtggcgcgaagccccaaacggcctgcttggggctcacggcgcttcgaggcggtcggctggtgggccctgctggccttggtgacgctgctgtccttcgccacccgcttccaccgcttggacgagccgccgcacatctgttgggat

SEQ ID NO: 72 - DNA, 849 bp, Homo sapiens
ctagccctgggccctgtggaacttgccctcactagcatcctgaccttgctggcgctgggctccattgccatcttcctggaggatgccgtctacctgtacaagaacaccctttgccccatcaagaggcggactctgctctggaagagctcggcacccacggtggtgtctgtgctgtgctgctttggtctctggatccctcgttccctggtgctggtggaaatgaccatcacctcgttttatgccgtgtgcttttacctgctgatgctggtcatggtggaaggctttggggggaaggaggcagtgctgaggacgctgagggacaccccgatgatggtccacacaggcccctgctgctgctgctgcccctgctgtccacggctgctgctcaccaggaagaagcttcagctgctgatgttgggccctttccaatacgccttcttgaagataacgctgaccctggtgggcctgtttctcgtccccgacggcatctatgacccagcagacatttctgaggggagcacagctctatggatcaacactttccttggcgtgtccacactgctggctctctggaccctgggcatcatttcccgtcaagccaggctacacctgggtgagcagaacatgggagccaaatttgctctgttccaggttctcctcatcctgactgccctacagccctccatcttctcagtcttggccaacggtgggcagattgcttgttcgcctccctattcctctaaaaccaggtctcaagtgatgaattgccacctcctcatactggagacttttctaatgactgtgctgacacgaatgtactaccgaaggaaagaccacaaggttgggtat

SEQ ID NO: 73 - DNA, 255 bp, Homo sapiens
atgggcagccaggaggtgctgggccacgcggcccggctggcctcctccggtctcctcctgcaggtgttgtttcggttgatcacctttgtcttgaatgcatttattcttcgcttcctgtcaaaggaaatcgttggcgtagtaaatgtaagactaacgctgctttactcaaccaccctcttcctggccagagaggccttccgcagagcatgtctcagtgggggcacccagcgagactggagccagaccctcaacctg

SEQ ID NO: 74 - DNA, 255 bp, Homo sapiens
atggaaggcgtggacttgctagggtttctcatcatcacattaaactgcaacgtgaccatggtgggaaagctctggttcgtcctcacgatgctgctgcggatgctggtgattgtcttggcggggcgacccgtctaccaggacgagcaggagaggtttgtctgcaacacgctgcagccgggatgcgccaatgtttgctacgacgtcttctcccccgtgtctcacctgcggttctggctgatccagggcgtgtgcgtc

SEQ ID NO: 75 - DNA, 255 bp, Homo sapiens
atggcattttatagctgctgctgggtcctcttggcactcacctggcacacctctgcctacgggccagaccagcgagcccaaaagaagggggacattatccttggggggctctttcctattcattttggagtagcagctaaagatcaagatctcaaatcaaggccggagtctgtggaatgtatcaggtataatttccgtgggtttcgctggttacaggctatgatatttgccatagaggagataaacagcagccca

SEQ ID NO: 76 - DNA, 255 bp, Homo sapiens
atgggagtgtggacagggcggttagggggctgggcccaggtcatgtttcagtttctaagccaggggttttactgtggagtaggactgtttactcgttttcttaagctgctgggtgctttgctgctcctggctctggccctctttttgggctttctacagttgggatggcggtttctggtgggactaggtgaccggttaggctggagggataaggctacctggctcttctcttggctggattctccagccttgcag

SEQ ID NO: 77 - DNA, 255 bp, Homo sapiens
cggcggctgcggcgcctggcgcacctggtgctcttctgccccttctccaagcgcctgcagggccggctcccaggcctcagggtccgctgcatcttcctggcctggctgggcgtctttgcaggcagctggctggtgtacgtgcactactcgtcctactcggagcgctgtcgcggccatgtctgccaggtggtcatttgtgaccagtaccgcaaggggatcatctcgggctccgtctgccaggacctgtgtgagctg

SEQ ID NO: 78 - DNA, 255 bp, Homo sapiens
atggtgaaattcccggcgctcacgcactactggcccctgatccggttcttggtgcccctgggcatcaccaacatagccatcgacttcggggagcaggccttgaaccggggcattgctgctgtcaaggaggatgcagtcgagatgctggccagctacgggctggcgtactccctcatgaagttcttcacgggtcccatgagtgacttcaaaaatgtgggcctggtgtttgtgaacagcaagagagacaggaccaaa

SEQ ID NO: 79 - DNA, 255 bp, Homo sapiens
gagatcctgatcaaggtgcaggtgtatgtgagcggggagctggtgcccctggcccgggcctcagtggatgtgtttgggaaccggactctgctggcagctggcaccacagactcagagggtgtggccaccctgcccctcagttatcgcttgggcacctgggtgctggtcactgctgcccgccctggcttcctcaccaactctgtgccctggcgtgttgacaagctgcccttgtatgcgtctgtcagcctctacctg

SEQ ID NO: 80 - DNA, 750 bp, Homo sapiens
ctcggatctaggagctactcgcccggccctgggcggtgggaggcggcggcggcggcggcgctcgcgcacctcggaggagccaggagccggaaccagggccgagcccgcgggccggggctagccagccggtcggagatgtccgcccagaggttaatttctaacagaacctcccagcaatcggcatctaattctgattacacctgggaatatgaatattatgagattggaccagtttcctttgaaggactgaaggctcataaatattccattgtgattggattttgggttggtcttgcagtcttcgtgatttttatgttttttgtgctgaccttgctgaccaagacaggagccccacaccaagacaatgcagagtcctcagagaagagattcagaatgaacagctttgtgtcagactttggaagacctctggagccagataaagtattttctcgccaaggcaacgaggagtccaggtctctctttcactgctacatcaatgaggtggaacgcttggacagagccaaagcttgtcaccagaccacagcccttgacagtgacgtccaactccaggaagccatcagaagcagtgggcagccagaggaggagctgaacaggctcatgaagtttgacatccccaactttgtgaacacagaccagaactactttggggaggatgatcttctgatttctgaaccacctattgttctggaaactaagccactttcccagacctcacacaaagacctggat

SEQ ID NO: 81 - DNA, 255 bp, Homo sapiens
atggctcgactccccgctggcattcgcttcatcatctcattctccagggatcagtggtacagagccttcatttttattttgacatttctgctgtatgcaagttttcacttatctcgaaagcctatcagcatagttaagggtgagctccacaagtactgcactgcttgggatgaagctgacgtcaggttcagcagccagaacaggaagtctgggtccgctgccccccaccagctccctgacaatgagaccgactgt

SEQ ID NO: 82 - DNA, 324 bp, Homo sapiens
atgagtctgacttccagttccagcgtacgagttgaatggatcgcagcagttaccattgctgctgggacagctgcaattggttatctagcttacaaaagattttatgttaaagatcatcgaaataaagctatgataaaccttcacatccagaaagacaaccccaagatagtacatgcttttgacatggaggatttgggagataaagctgtgtactgccgttgttggaggtccaaaaagttcccattctgtgatggggctcacacaaaacataacgaagagactggagacaatgtgggccctctgatcatcaagaaaaaagaaact

SEQ ID NO: 83 - DNA, 255 bp, Homo sapiens
gttattcttcatcctagcatttctgttcgactagcagcagcttggtgtttacactgcattgccgtggcattaccctcctacctaacaccactcttggatcgttgccttgaacggcttactggacataagtcttcacctgaagcagtgactggcttcagttttgctgtagcagctttgttgggagcagtaaaacattgtcctttaggaattcctcatggaaaaggcaagattattatgacattagcagaggatttg

SEQ ID NO: 84 - DNA, 255 bp, Homo sapiens
atgtggggatttttgaagcgccctgtagtggtgacggctgacatcaacttgagccttgtggccctgactgggatggggttactgagccggctgtggcgactcacctacccgcgggctgtggtttttgacgaagtatattatgggcagtacatctctttttacatgaaacaaatcttcttcttggatgacagtgggccgccatttggccacatggtgctggccttgggaggttatttaggaggattcgatggcaat

SEQ ID NO: 85 - DNA, 255 bp, Homo sapiens
atgatttccctcccggggcccctggtgaccaacttgctgcggtttttgttcctggggctgagtgccctcgcgcccccctcgcgggcccagctgcaactgcacttgcccgccaaccggttgcaggcggtggagggaggggaagtggtgcttccagcgtggtacaccttgcacggggaggtgtcttcatcccagccatgggaggtgccctttgtgatgtggttcttcaaacagaaagaaaaggaggatcaggtgttg

SEQ ID NO: 86 - DNA, 255 bp, Homo sapiens
cacgtgcccgtgccgcatgtgtctgtgtgtgtctgcatgcatctgtgtgtctggttctgtgtgtgtctgtgtgtgtgtctgcatgtctgcgtgtacctgagtgtgagcatgtgtctgtgtgtgtctgtgtgtgtgtctgcatgtctgcgtgtacctgagtgtgagcatgtgtgtgtctgcctgcatgtgcctgtgtctgcatgtgtctgcctttgtgtgtctgtatgtgcctgtgtgtctgtgtatgcctgcgtg

SEQ ID NO: 87 - DNA, 255 bp, Homo sapiens
atcttatctaagctttctttgcctacccgtgcctgggaaccagcaatgaagaagagttttgcttttgacaatgttggctatgaaggtggtctggatggcctgggcccttcttctcaggtggccaccagcacagtcaggatcttgggcatgacttgccagtcatgtgtgaagtccattgaggacaggatttccaatttgaaaggcatcatcagcatgaaggtttccctggaacaaggcagtgccactgtgaaatat

SEQ ID NO: 88 - DNA, 351 bp, Homo sapiens
caggattccactgcaatgagctggtggaggaataatttctggatcatcttagctgtggccatcatcgttgtctctgtgggtctgggcctcatcctgtactgtgtctgcaagaaatgggaaattgccaagcccctgaaacacaagcaagtagatgaagaaaagatgtatgagaatgttcttaatgagtcgccagttcaattaccgcctctgccaccgaggaattggccttctctagaagactcttatggagtcttgctctgtcacccaggctggagtgcaatggcacgatctcggctcactgcaagctccgcctcccgggttcatgccattctcctacctcagcctccggag

SEQ ID NO: 89 - DNA, 255 bp, Homo sapiens
cggaggcggatgggcgcggctccctcccccactcaggcctcttcacggggcggggggccgggtcccccagcccccacccgcgccgtgtccagctcctcgcgtgctcgcggcggagccctgagcgcactgggtccgagtcctgcgcgccccctcaccacctcccccgcacctgctcctcctcctcggtcccgcccagcgcgccagcagcccgatccccagtgctgggagaagagagggggcgcaggcggcgacaca

SEQ ID NO: 90 - DNA, 255 bp, Homo sapiens
atgcacttttggttctattatgccacccttttacctggcttccaaagaactgtgggtatagcagattccaattataattggttttatggtccagaaagccagctagttttcttggataagttcatcttaaagaatggagctggaaattggttagctcagcaaattagaaagcaccgacctaaagatggaccgatggttccttcaactgcccaaaggtggagtactcttcacactgaatacatctggtatgatccc

SEQ ID NO: 91 - DNA, 255 bp, Homo sapiens
tcaagaccgagctgccacggccgcctccccgcccgccccccattctacgcgcctgcccacaccctcctcccctccttccagcgcctttcggtggagcactgcggcactcagcccgagctgccgttttcccctcgcggggaacgctgtgacccccccgcaggagcggcggggcggggtgggggggcccgggagaagatggcgacgccgggaagcgaaccccaacctttcgtcccggccctttcggtagctactctg

SEQ ID NO: 92 - DNA, 255 bp, Homo sapiens
atggccgctgcccgcccagcgcgggggccggagctcccgctcctggggctgctgctgctgctgctgctgggggacccgggccggggggcggcctcgagcgggaacgcgaccgggcctgggcctcggagcgcgggcgggagcgcgaggaggagcgcggcggtgactggccctccgccgccgctgagccactgcggccgggctgccccctgcgagccgctgcgctacaacgtgtgcctgggctcggtgctgccctac

SEQ ID NO: 93 - DNA, 549 bp, Homo sapiens
atggaacagcggttagctgagtttcgggcggcgcggaaacgggcgggtctggcggcccaaccccctgctgccagtcagggcgcacaaaccccaggagagaaggcggaagcagcagcgactctaaaggcagccccaggctggctaaagcggttcctggtatggaaacctaggcccgcgagtgcccgggcccagcccggcctagttcaggaagcggctcagccccagggcagcacatcagagacaccatggaacacagccattcctctgccgtcgtgctgggaccagtctttcctgaccaatatcaccttcttgaaggttcttctctggttggtcctgctgggactgtttgtggaactggaatttggcctggcatattttgtcctgtccttgttctattggatgtacgtcgggacacgaggccctgaagagaagaaagagggagagaagagcgcctactctgtgttcaatccaggctgtgaagccatccagggcaccctgactgcagagcagttggagcgcgagttacagttgagacccctggcagggaga

SEQ ID NO: 94 - DNA, 717 bp, Homo sapiens
atggccaggggctgcctctgctgcttgaagtacatgatgttcctcttcaatttgatattctggctctgtggctgtgggctgctgggagtgggcatctggctctccgtgtcccaaggcaactttgccaccttctcccccagcttcccttcgttgtctgcagccaacctggtcattgccataggcaccattgtcatggtgacgggcttcctcggctgcctgggggccatcaaggaaaacaagtgcctcctcctcagctttttcatcgtcctgttggtcatcctcctagcagagctgatcttactcatcctcttctttgtctacatggacaaggtgaacgagaacgccaagaaggacctgaaggaaggcctgctgctgtaccacaccgagaacaacgtggggctgaagaacgcctggaacatcatccaggctgagatgcgatgctgtggtgtcactgactacacagactggtacccagtgctgggggagaacacggttcccgaccgctgctgcatggagaactcccagggctgcgggcgcaacgccaccacgcctttgtggagaacgggctgctatgaaaaggtgaagatgtggttcgatgacaataagcacgtgctgggcacggtggggatgtgcatcctcatcatgcagatcctgggcatggccttctccatgaccctcttccagcacatccaccggactggtaagaagtacgacgca

SEQ ID NO: 95 - DNA, 684 bp, Homo sapiens
atgccggtcaaaggaggcaccaagtgcatcaaatacctgctgttcggatttaacttcatcttctggcttgccgggattgctgtccttgccattggactatggctccgattcgactctcagaccaagagcatcttcgagcaagaaactaataataataattccagcttctacacaggagtctatattctgatcggagccggcgccctcatgatgctggtgggcttcctgggctgctgcggggctgtgcaggagtcccagtgcatgctgggactgttcttcggcttcctcttggtgatattcgccattgaaatagctgcggccatctggggatattcccacaaggatgaggtgattaaggaagtccaggagttttacaaggacacctacaacaagctgaaaaccaaggatgagccccagcgggaaacgctgaaagccatccactatgcgttgaactgctgtggtttggctgggggcgtggaacagtttatctcagacatctgccccaagaaggacgtactcgaaaccttcaccgtgaagtcctgtcctgatgccatcaaagaggtcttcgacaataaattccacatcatcggcgcagtgggcatcggcattgccgtggtcatgatatttggcatgatcttcagtatgatcttgtgctgtgctatccgcaggaaccgcgagatggtc

SEQ ID NO: 96 - DNA, 255 bp, Homo sapiens
atgctgggaatctgcagggggagacggaaattcttggctgcctcgttgagtcttctctgcatcccagccatcacctggatttacctgttttctgggagcttcgaagatggaaagcccgtgtctctgtcaccgctggagtcccaggcacacagccccaggtacacggcctccagccagcgggagcgcgagagcctggaggtgcgcatgcgcgaggtggaggaggagaaccgcgccctccgcaggcagctcagcctg

SEQ ID NO: 97 - DNA, 255 bp, Homo sapiens
ggatttggtcgtctccctgattccgagctgcgggcagggagaggggcctcgcgccgccctcagcagccggcggcggccgaggtagaccgagcggggacggaaggacagaccgacgtcgccgagctggaatcatgtgagggccaaccggggaaggtggagcagatgagcacacacaggagccgtctcctcaccgccgcccctctcagcatggaacagaggcggccctggccccgggccctggaggtggacagccgc

SEQ ID NO: 98 - DNA, 255 bp, Homo sapiens
atggggagctgcgcgcggctgctgctgctctggggctgcacggtggtggccgcaggactgagtggagtagctggagtgagttcccgctgtgaaaaagcctgcaaccctcggatgggaaatttggctttggggcgaaaactctgggcagacaccacctgcggtcagaatgctaccgaactgtactgcttctacagtgagaacacggatctgacttgtcggcagcccaaatgtgacaagtgcaatgctgcctatcct

SEQ ID NO: 99 - DNA, 255 bp, Homo sapiens
tttatgtccatgttccagatcctcacccaggaaggatgggtggacgtaatggaccaaactctaaatgctgtgggacatatgtgggcacccgtggttgccatctatttcattctctatcatctttttgccactctgatcctcctgagtttgtttgttgctgttattttggacaacttagaacttgatgaagacctaaagaagcttaaacaattaaagcaaagtgaagcaaatgcggacaccaaagaaaagctccct

SEQ ID NO: 100 - DNA, 255 bp, Homo sapiens
atggcaaggaaacaaaataggaattccaaggaactgggcctagttcccctcacagatgacaccagccacgccgggcctccagggccagggagggcactgctggagtgtgaccacctgaggagtggggtgccaggtggaaggagaagaaaggactggtcctgctcgctcctcgtggcctccctcgcgggcgccttcggctcctccttcctctacggctacaacctgtcggtggtgaatgcccccaccccgtacatc

SEQ ID NO: 101 - DNA, 255 bp, Homo sapiens
atggaggggagcgcgagccccccggaaaagccccgcgcccgccctgcggctgccgtgctgtgccggggcccggtagagccgctggtcttcctggccaactttgccttggtcctgcagggcccgctcaccacgcagtatctgtggcaccgcttcagcgccgacctcggctacaatggcacccgccaaagggggggctgcagcaaccgcagcgcggaccccaccatgcaggaagtggagacccttacctcccactgg

SEQ ID NO: 102 - DNA, 255 bp, Homo sapiens
tattccagtaccagtacccggagagaacatgtcaaagttaaaaccagctcccagccaggcttcctggaacggctgagcgagacctcgggtgggatgtttgtggggctcatggccttcctgctctccttctacctaattttcaccaatgagggccgcgcattgaagacggcaacctcattggctgaggggctctcgcttgtggtgtctcccgacagcatccacagtgtggctccggagaatgaaggaaggctggtg

SEQ ID NO: 103 - DNA, 255 bp, Homo sapiens
atgaattgggaaaatgagagctccccaaaagagtttatactacttggcttctcagatagggcttggctacaaatgcccctttttgtggtcctgttaatatcatacacaatcaccatatttggcaatgtgtccatcatgatggtgtgcattctggatcccaaacttcatactcccatgtatttctttctcactaatctctccatcttagatctctgctataccacaactacagtccctcatatgttggtaaatatt

SEQ ID NO: 104 - DNA, 870 bp, Homo sapiens
atcctcaccaccaccggcctcttcttcgtctttgactgtccctacctggctcgcaagctgacccttgccatccccatcatcgctgccatcctcttcttcttcgtcatgagctgcctgctgcagacaagcttcaccgaccctgggatcctgccccgggccactgtctgtgaagcagccgccctggagaaacagatcgacaacacaggcagttctacataccggccaccccctcggacccgggaggtgctgatcaacgggcagatggtgaagctgaagtactgcttcacctgcaagatgttccggccaccccgaacctcacactgcagtgtctgcgacaactgtgtggaacgatttgaccatcactgcccctgggtgggcaactgtgtggggagacggaactatcgcttcttctacgcgtttattctctccctctcattcctgacggccttcatcttcgcctgtgtggtcacccacctgacgttgcgtgtggctgggaggctccccaccctccacccattgaagtccttaactgccctcaccgtgctggagttggtgatctgcttcttctccatctggtccattctgggcctctcagggtttcacacgtacctcgtcgcctccaacctgactactaatgaagacatcaaaggctcgtggtccagcaagaggggcggtgaggcctctgtcaacccctacagccataaaagtattatcaccaactgctgtgctgtgctctgtggccccctacctcccagcctaattgaccggaggggatttgtgcagtccgacaccgtgttgccctcacccatcagaagcgatgagccagcctgcagagccaagcctgatgccagcatggtaggaggccacccc

SEQ ID NO: 105 - DNA, 720 bp, Homo sapiens
atggagccgcgggcgctcgtcacggcgctcagcctcggcctcagcctgtgctccctggggctgctcgtcacggccatcttcaccgaccactggtacgagaccgacccccggcgccacaaggagagctgcgagcgcagccgcgcgggcgccgaccccccggaccagaagaaccgcctgatgccgctgtcgcacctgccgctgcgggactcgcccccgctggggcgccggctgctcccgggcggcccggggcgcgccgaccccgagtcctggcgctcgctcctggggctcggcgggctggacgccgagtgcggccggcccctcttcgccacctactcgggcctctggaggaagtgctacttcctgggcatcgaccgggacatcgacaccctcatcctgaaaggtattgcgcagcgatgcacggccatcaagtaccacttttctcagcccatccgcttgcgaaacattccttttaatttaaccaagaccatacagcaagatgagtggcacctgcttcatttaagaagaatcactgctggcttcctcggcatggccgtagccgtccttctctgcggctgcattgtggccacagtcagtttcttctgggaggagagcttgacccagcacgtggctggactcctgttcctcatgacagggatattttgcaccatttccctctgtacttatgccgccagtatctcgtatgatttgaaccggctccca

SEQ ID NO: 106 - DNA, 795 bp, Homo sapiens
atgaagccagccatggaaactgcagccgaggaaaatactgaacaaagccaagagagaaaaggctgctttgaatgctgcatcaagtgtctgggaggagtcccctacgcctccctggtggccaccatcctctgcttctccggggtggccttattctgcggctgtgggcatgtggctctcgcaggcaccgtggcgattcttgagcaacacttctccaccaacgccagtgaccatgccttgctgagcgaggtgatacaactgatgcagtatgtcatctatggaattgcgtcctttttcttcttgtatgggatcattctgttggcagaaggcttttacaccacaagtgcagtgaaagaactgcacggtgagtttaaaacaaccgcttgtggccgatgcatcagtggaatgttcgttttcctcacctatgtgcttggagtggcctggctgggtgtgtttggtttctcagcggtgcccgtgtttatgttctacaacatatggtcaacttgtgaagtcatcaagtcaccgcagaccaacgggaccacgggtgtggagcagatctgtgtggatatccgacaatacggtatcattccttggaatgctttccccggaaaaatatgtggctctgccctggagaacatctgcaacacaaacgagttctacatgtcctatcacctgttcattgtggcctgtgcaggagctggtgccaccgtcattgccctgctgatctacatgatggctactacatataactatgcggttttgaagtttaagagtcgggaagattgctgcactaaattc

SEQ ID NO: 107 - DNA, 255 bp, Homo sapiens
ggtttgaaaaacaaaccgaaaaagatgggccacataaagccagacttgattgacgttgacttaatcagagggtcaacatttgccaaagcaaaacctgaaattccatggacatctctgactcggaaggggcttgttcgagttgtattttttccattgttcagcaattggtggattcaggttacctctttaagaatctttgtttggctgttactactttatttcatgcaagttatagcaattgtcttatatttgatg

SEQ ID NO: 108 - DNA, 678 bp, Homo sapiens
atggagactgtggtgattgttgccataggtgtgctggccaccatctttctggcttcgtttgcagccttggtgctggtttgcaggcagcgctactgccggccgcgagacctgctgcagcgctatgattctaagcccattgtggacctcattggtgccatggagacccagtctgagccctctgagttagaactggacgatgtcgttatcaccaacccccacattgaggccattctggagaatgaagactggatcgaagatgcctcgggtctcatgtcccactgcattgccatcttgaagatttgtcacactctgacagagaagcttgttgccatgacaatgggctctggggccaagatgaagacttcagccagtgtcagcgacatcattgtggtggccaagcggatcagccccagggtggatgatgttgtgaagtcgatgtaccctccgttggaccccaaactcctggacgcacggacgactgccctgctcctgtctgtcagtcacctggtgctggtgacaaggaatgcctgccatctgacgggaggcctggactggattgaccagtctctgtcggctgctgaggagcatttggaagtccttcgagaagcagccctagcttctgagccagataaaggcctcccaggccctgaaggcttcctgcaggagcagtctgcaatt

SEQ ID NO: 109 - DNA, 255 bp, Homo sapiens
atgggactcttggtatttgtgcgcaatctgctgctagccctctgcctctttctggtactgggatttttgtattattctgcgtggaagctacacttactccagtgggaggaggactccaattcagtggttctttcctttgactccgctggacaaacactaggctcagagtatgatcggttgggcttcctcctgaatctggactctaaactgcctgctgaattagccaccaagtacgcaaacttttcagagggagct

SEQ ID NO: 110 - DNA, 846 bp, Homo sapiens
atgagaccggtttcctggggagctcagatttcttggaaacaagcagacccttttgcgtcgttgaagaaagttggaaaagattctactgtcttactaatctgcatcaccgtgtttctttcataccttcctgaagctggacagtattcaagtttttttctctatctcaggcaggtgagtagttttggatctgttaaaattgcagcattcatagctatggtaggaattctgtctattgtggctcagacggcctttcttagcatcttgatgagatcattaggaaataagaatactgtcctccttggcttgggcttccagatgctccagttagcctggtacggttttggatcacaggcctggatgatgtgggcagcagggaccgtggctgccatgtccagcatcacgtttccggcaatcagtgccctcgtctctcggaatgcagagtcagatcagcaaggagttgcccaggggatcataactggaataagaggactatgcaatggcctggggccagcactgtatggcttcatattctacatgttccatgtggaactgactgagttgggcccgaaattgaattctaacaacgttcccctgcagggagctgtcatcccaggcccgccgtttttatttggggcatgtatagtccttatgtcttttctggttgccttattcattcctgaatacagtaaagccagtggagttcaaaaacacagtaacagcagcagcggcagcctgaccaacaccccagaacggggcagtgatgaggacattgagccactactgcaagacagcagcatctgggagctctcttcatttgaggagcctgggaatcagtgcactgagctg

SEQ ID NO: 111 - DNA, 255 bp, Homo sapiens
gccatggcggcggcgggccggctcccgagctcctgggccctcttctcgccgctcctcgcagggcttgcactactgggagtcgggccggtcccagcgcgggcgctgcacaacgtcacggccgagctctttggggccgaggcctggggcacccttgcggctttcggggacctcaactccgacaagcagacggatctcttcgtgctgcgggaaagaaatgacttaatcgtctttttggcagaccagaatgcaccctat

SEQ ID NO: 112 - DNA, 255 bp, Homo sapiens
ccagtcactattgatcagatcttagagatggtaaatggccagaggggactagtgctttactattccctggctgcaggctatctgtatagctggctgctggctcctggggcaggaattgtgaagtttcatgaacactacctgggtgagaacacagtggaaaactcaagtgacttccaggccagcagcagtgtaacccttccaacagcaaccggctcagccctggagcagcacattgccagtgtccgggaggccctg

SEQ ID NO: 113 - DNA, 303 bp, Homo sapiens
atgaacctggagcgagtgtccaatgaggagaaattgaacctgtgccggaagtactacctgggggggtttgctttcctgccttttctctggttggtcaacatcttctggttcttccgagaggccttccttgtcccagcctacacagaacagagccaaatcaaaggctatgtctggcgctcagctgtgggcttcctcttctgggtgatagtgctcacctcctggatcaccatcttccagatctaccggccccgctggggtgcccttggggactacctctccttcaccatacccctgggcaccccc

SEQ ID NO: 114 - DNA, 255 bp, Homo sapiens
atggcacccaaaaagaagattgtcaaaaagaacaaaggagatatcaatgagatgactataatcgtagaagatagccccctaaacaaactgaatgctttgaatgggctcctagagggaggcaatggccttagctgcatttcttctgaactaacagatgcttcttatggccccaacctcttggaaggtttaagtaaaatgcggcaggagaacttcctatgtgacttagtcattggtaccaaaaccaaatcctttgat

SEQ ID NO: 115 - DNA, 255 bp, Homo sapiens
atgaccagctccctgtacttcatcacttttggcatgggtgccagcccattcacaaacatagaggctgtgaaggtcttctgtcaaaacatgtgtgtctctattctgttgaactacttctacattttctccttctttggctcctgtctggtctttgctggccaactagagcaaaaccgctaccacagcatcttttgctgtaagatcccttctgcagaatacctggatcgcaaacctgtgtggttccagacagtgatg

SEQ ID NO: 116 - DNA, 255 bp, Homo sapiens
ccagcgattcacgagttccccacagatctgttctccaataaggagcgacagcacggagccgtcctgctgcacatccttggtgctctgtatatgttctatgccttggccatagtgtgcgatgacttctttgttccgtctctagagaagatctgtgagagactccatctgagcgaagatgtggctggagccaccttcatggctgcaggaagctcaacgccagagctgtttgcgtctgttattggggtgttcatcacc

SEQ ID NO: 117 - DNA, 747 bp, Homo sapiens
atggcatcgaggagaatggagaccaaacctgtgataacctgtctcaaaaccctcctcatcatctactccttcgtcttctggatcactggggtgatcctgctggctgttggagtctggggcaaacttactctgggcacctatatctcccttattgccgagaactccacaaatgctccctatgtgctcatcggaactggcaccactattgttgtctttggcctgtttggatgctttgctacatgtcgtggtagcccatggatgctgaaactgtatgccatgtttctgtccctggtgttcctggctgagctcgtagctggcatttcagggtttgtgtttcgtcatgagatcaaggacaccttcctgaggacttacacggacgctatgcagacttacaatggcaatgatgagaggagccgggcagtggaccatgtgcagcgcagcctgagctgctgtggtgtgcagaactacaccaactggagcaccagcccctacttcctggagcatggcatcccccccagctgctgcatgaacgaaactgattgtaatccccaggatctacacaatctgactgtggccgccaccaaagttaaccagaagggttgttatgatctggtaactagtttcatggagactaacatgggaatcatcgctggagtggcgtttggaatcgcattctcccagttaattggcatgctgctggcctgctgtctgtcccggttcatcacggccaatcagtatgagatggtg

SEQ ID NO: 118 - DNA, 255 bp, Homo sapiens
atggccgcggcctcctccccgcccagggccgagaggaagcgctggggttggggccgcctgccaggcgcccggcggggcagcgcgggcctggccaagaagtgccccttctcgctggagctggcggagggcggcccggcgggcggcgcgctctacgcgcccatcgcgcccggcgccccaggtcccgcgccccctgcgtccccggccgcgcccgccgcgcccccagttgcctccgaccttggcccgcggccgccggtg

SEQ ID NO: 119 - DNA, 255 bp, Homo sapiens
aacgtcctggagggcgactccatggatcaggacgtcgaaagcccagtggccattcaccagccaaagttgcctaagcaggccagggatgacctgccaagacacatcagccgagatcggaccaaaaggaaaatccagaggtacgtgaggaaagacggaaagtgcaatgttcatcacggcaacgtgagggagacctatcgctacctgaccgatatcttcaccacattagtggacctgaagtggagattcaacctattg

SEQ ID NO: 120 - DNA, 561 bp, Homo sapiens
ataatagttggagaaactgctgtcttttgcctacaactagccacaagggattttgaaaaccaggaaaaaactattttaactggagactgttgctatataaacccgctggtgcgccgaactgtccgatttcttggaatttatacatttggactgtttgctacagatatctttgtaaatgctggacaagtagtcacaggaaatctggccccacatttccttgccctgtgtaagcccaattatacagcacttggatgtcagcagtatacacaattcatcagtggggaagaggcctgtactggcaacccagatctcatcatgagagcccgaaaaacctttccatccaaagaagcagctctcagtgtctatgcagctatgtatctgaccatgtacatcaccaacacaatcaaagccaagggaaccagacttgctaagccagttctatgcttgggcttaatgtgtttggcatttcttactggactcaacagagtagcagaatatcgaaatcattggtcagatgttatagcaggctttctggttggaatatctatagcagtatttctg

SEQ ID NO: 121 - DNA, 255 bp, Homo sapiens
atggcttccccgcggagctccgggcagcccgggccgccgccgccgccgccaccgccgcccgcgcgcctgctactgctactgctgctgccgctgctgctgcctctggcgcccggggcctggggctgggcgcggggcgccccccggccgccgcccagcagcccgccgctctccatcatgggcctcatgccgctcaccaaggaggtggccaagggcagcatcgggcgcggtgtgctccccgccgtggaactggccatc

SEQ ID NO: 122 - DNA, 255 bp, Homo sapiens
atggctgagatcaccaatatccgacctagctttgatgtgtcaccggtggtggccggcctcatcggggcctctgtgctggtggtgtgtgtctcggtgaccgtctttgtctggtcatgctgccaccagcaggcagagaagaagcagaagaacccaccatacaagtttattcacatgctcaaaggcatcagcatatacccagagaccctcagcaacaagaagaaaatcatcaaagtgcggagagacaaagatggtcct

SEQ ID NO: 123 - DNA, 255 bp, Homo sapiens
  misc_feature 237, 238: n = A,T,C or G
aaagcccccagtgtcatcatcacaggtcttaagccagccaccaaatatgtatttcacatccgagtgagaactgcgacaggatacagtggctacagtcagaaatttgaatttgaaacaggagatgaaacttctgacatggcagcagaacaaggacagattctcgtgatagccaccgccgctgttggcggattcactctcctcgtcatcctcactttattcttcttgatcactgggagnntgcgcttcccgggaatt

SEQ ID NO: 124 - DNA, 624 bp, Homo sapiens
atggaccgttcactgggatggcaagggaattctgtccctgaggacaggactgaagctgggatcaagcgtttcctggaggacaccacggatgatggagaactgagcaagttcgtgaaggatttctcaggaaatgcgagctgccacccaccagaggctaagacctgggcatccaggccccaagtcccggagccaaggccccaggccccggacctctatgatgatgacctggagttcagacccccctcgcggccccagtcctctgacaaccagcagtacttctgtgccccagcccctctcagcccatctgccaggccccgcagcccatggggcaagcttgatccctatgattcctctgaggtagagcctccagccctgcctttgcctttcagtgggctgctgcaggaagaccgggggcagggagcagagtgtgtgtgtgtgtgtgtgtgtgtgtgtgtgtgtgtgtgtttgtgtgtgtgtgtatctgggacctatttcagtcctgtgtcagccctagctccaagatatctgcccccaagggcactggaaatttgcagtttcagcaagggcaggaggcccagctggtggcctcagatgggaactcacagaagtctggcactgcttttt

SEQ ID NO: 125 - DNA, 255 bp, Homo sapiens
atgagaacttaccgctacttcttgctgctcttttgggtgggccagccctacccaactctctcaactccactatcaaagaggactagtggtttcccagcaaagaaaagggccctggagctctctggaaacagcaaaaatgagctgaaccgttcaaaaaggagctggatgtggaatcagttctttctcctggaggaatacacaggatccgattatcagtatgtgggcaagttacattcagaccaggatagaggagat

SEQ ID NO: 126 - DNA, 255 bp, Homo sapiens
atgtacttggtggcgggggacagggggttggccggctgcgggcacctcctggtctcgctgctggggctgctgctgctgctggcgcgctccggcacccgggcgctggtctgcctgccctgtgacgagtccaagtgcgaggagcccaggaactgcccggggagcatcgtgcagggcgtctgcggctgctgctacacgtgcgccagccagaggaacgagagctgcggcggcaccttcgggatttacggaacctgcgac

SEQ ID NO: 127 - DNA, 321 bp, Homo sapiens
atgttcccctatgaagcatctacaccaacaggaattagtgctagttgccgcagaccaatcaaaggggctgcaggccggccattagaactcagtgatttcaggatggaggagtctttttcatctaaatatgttcctaagtatgttcccttggcagatgtcaagtcagaaaagacaaaaaagggacgctccattcccgtatggataaaaattttgctgtttgttgttgtggcagtttttttgtttttggtctatcaagctatggaaaccaaccaagtaaatcccttctctaattttcttcatgttgaccctagaaaatccaac

SEQ ID NO: 128 - DNA, 255 bp, Homo sapiens
tcttccaggaagagtctgccgaaggtgaaggccatggacttcatcacctccacagccatcctgcccctgctgttcggctgcctgggcgtcttcggcctcttccggctgctgcagtgggtgcgcgggaaggcctacctgcggaatgctgtggtggtgatcacaggcgccacctcagggctgggcaaagaatgtgcaaaagtcttctatgctgcgggtgctaaactggtgctctgtggccggaatggtggggcccta

SEQ ID NO: 129 - DNA, 699 bp, Homo sapiens
atggcgtggcagggactagcggccgagttcctgcaggtgccggcggtgacgcgggcttacaccgcagcctgtgtcctcaccaccgccgcggtgcagctggagctcctcagcccctttcaactctacttcaacccgcaccttgtgttccggaagttccaggtctggaggctcgtcaccaacttcctcttcttcgggcccctgggattcagcttcttcttcaacatgctcttcgtgttccgctactgccgcatgctggaagagggctccttccgcggccgcacggccgacttcgtcttcatgtttctcttcgggggcgtccttatgaccctgctgggactcctgggcagcctgttcttcctgggccaggccctcatggccatgctggtgtacgtgtggagccgccgcagccctcgggtgagggtcaacttcttcggcctgctcactttccaggcaccgttcctgccttgggcgctcatgggcttctcgctgctgctgggcaactccatcctcgtggacctgctggggattgcggtgggccatatctactacttcctggaggacgtcttccccaaccagcctggaggcaagaggctcctgcagacccctggcttcctgctggcgacagcccagcagtgcccacacaggactgggccctccgcaggggacttcagagcagcaaggccccagctggcagtagcc

SEQ ID NO: 130 - DNA, 255 bp, Homo sapiens
gatcctgacagtgatcaacctctgaacagcctcgatgtcaaacccctgcgcaaaccccgtatccccatggagaccttcagaaaggtggggatccccatcatcatagcactactgagcctggcgagtatcatcattgtggttgtcctcatcaaggtgattctggataaatactacttcctctgcgggcagcctctccacttcatcccgaggaagcagctgtgtgacggagagctggactgtcccttgggggaggac

SEQ ID NO: 131 - DNA, 255 bp, Homo sapiens
atgatgcatttcaaaagtggactcgaattaactgagttgcaaaacatgacagtgcccgaggatgataacattagcaatgactccaatgatttcaccgaagtagaaaatggtcagataaatagcaagtttatttctgatcgtgaaagtagaagaagtctcacaaacagccatttggaaaaaaagaagtgtgatgagtatattccaggtacaacctccttaggcatgtctgtttttaacctaagcaacgccattatg

SEQ ID NO: 132 - DNA, 870 bp, Homo sapiens
ggaggctgcgacgctgccgggtccgccgcggcgctggcggcagtggccggtgtgagcgcagagccgggccctgggcagcagcggcagcgcggtaggacctcgcgcagcgtccgcgggctccggggcgggggcgccagcggcgaagccccctccccggggaggcgggacctgggggagctcccgagccggggagcggcggcggccgggaacgatgcatcagaagctgctgaagagcgcgcattacatcgagctgggcagctaccagtactggccggtcctggtgccccgtggcatccgcctgtacacctacgagcagatccccgggtccctcaaggacaacccgtacatcaccgacggctaccgggcctacctgccgtccaggctgtgtatcaaaaggtctgtatgctttgctctgtgggctatcatcttttttcctgccatcggtcagaaaaaacatgtcgaagatggatggcattagattatgcaggaatttctattggaatactgggctgctatgtctcaggagtattttacgcattttattgtaataactactggcgtcaggtgtacttgatcacagtgcttgctatgatcctggcagtgttctttgcgcagattcatcccaattacctcacgcagcaatggcaaaggctccgttctatcatcttttgttctgtttcgggatatggagtgattcctactcttcactgggtttggctcaatggaggaattggtgctcctattgtacagaatcaggaacgaagattcagggaatgtctgtcacatcttatggcatcccacctggacagaatatccgatttgaagattgtgattgacttccgtaaaactgtacaactctccatttggcag

SEQ ID NO: 133 - DNA, 255 bp, Homo sapiens
atgctgctggagacacaggacgcgctgtacgtggcgctggagctggtcatcgccgcgctttcggtggcgggcaacgtgctggtgtgcgccgcggtgggcacggcgaacactctgcagacgcccaccaactacttcctggtgtccctggctgcggccgacgtggccgtggggctcttcgccatcccctttgccatcaccatcagcctgggcttctgcactgacttctacggctgcctcttcctcgcctgcttcgtg

SEQ ID NO: 134 - DNA, 255 bp, Homo sapiens
cgcgcgtccgcccagggggctccggaagctgccccggcccgcggcctcctccctcgctcccgcttcccctttctcgctcaccgccgccctccttccccagctccctcgccgtccgcccgccccacagccagcggctccgcgccccctgcagccacgatgcccgcggcccggccgcccgccgcgggactccgcgggatctcgctgttcctcgctctgctcctggggagcccggcggcagcgctggagcgagatgct

SEQ ID NO: 135 - DNA, 255 bp, Homo sapiens
atgaggcgcgcggcgctctggctctggctgtgcgcgctggcgctgagcctgcagccggccctgccgcaaattgtggctactaatttgccccctgaagatcaagatggctctggggatgactctgacaacttctccggctcaggtgcaggtgctttgcaagatatcaccttgtcacagcagaccccctccacttggaaggacacgcagctcctgacggctattcccacgtctccagaacccaccggcctggaggct

SEQ ID NO: 136 - DNA, 255 bp, Homo sapiens
atgaggccgctgcctggcgctcttggcgtggcggcggccgccgcgctgtggctgctgctgctgctgctgccccggacccgggcggacgagcacgaacacacgtatcaagataaagaggaagttgtcttatggatgaatactgttgggccctaccataatcgtcaagaaacatataagtacttttcacttccattctgtgtggggtcaaaaaaaagtatcagtcattaccatgaaactctgggagaagcacttcaa

SEQ ID NO: 137 - DNA, 765 bp, Homo sapiens
atgcgctgggcggccgccaccctccgtggcaaggcgaggccccgggggcgggccggggtcaccacgcctgccccagggaaccgcacaggcacgtgcgctaagctgcggctacccccgcaagcaaccttccaagtccttcgtggcaatggtgcttccgtggggaccgtgctcatgttccgctgcccctccaaccaccagatggtggggtctgggctcctcacctgcacctggaaggggagcatcgctgagtggtcttcagggtccccagtgtgcaaactggtgccaccacacgagacctttggcttcaaggtggccgtgatcgcctccattgtgagctgtgccatcatcctgctcatgtccatggccttcctcacctgctgcctcctcaagtgcgtgaagaagagcaagcggcggcgctccaacaggtcagcccagctgtggtcccagctgaaagatgaggacttggagacggtgcaggccgcataccttggcctcaagcacttcaacaaacccgtgagcgggcccagccaggcgcacgacaaccacagcttcaccacagaccatggtgagagcaccagcaagctggccagtgtgacccgcagcgtggacaaggaccctgggatccccagagctctaagcctcagtggctcctccagctcaccccaagcccaggtgatggtgcacatggcaaaccccagacagcccctgcctgcctctgggctggccacaggaatgccacaacagcccgcagcatatgccctaggg

SEQ ID NO: 138 - DNA, 255 bp, Homo sapiens
atgcgcagaccgaggcagggaggcgggggtgcgggaggctccgcggctgcgcgggcgcgtgctggtggcctcggcggaggctcagtcccggcccgcgcccgcggcgcccccgctgcggcccgagcggcctggctgcgggatctgtgcgcacggatggcgcggccgccccggcagcacccgggggtctgggcgtcgctgctcctgctgctactgacggggcccgccgcctgcgcagccagccccgcggacgacggt

SEQ ID NO: 139 - DNA, 255 bp, Homo sapiens
gtgataggtatacagctggttgttaccatggtgatggccagtgtcatgcagaagattatacctcactattctcttgctcgatggctactctgtaatggcagtttgaggtggtatcaacatcctacagaagaagaattaagaattcttgcagggaaacaacaaaaagggaaaaccaaaaaagataggaaatataatggtcacattgaaagtaagccattaaccattccaaaggatattgaccttcatctagaaaca

SEQ ID NO: 140 - DNA, 255 bp, Homo sapiens
atgggtgacgcagaaggcgaagacgaggtccagttcctgcggacggacgatgaggtggtcctgcagtgcagcgctaccgtgctcaaggagcagctcaagctctgcctggccgccgagggcttcggcaaccgcctgtgcttcctggagcccactagcaacgcgcagaatgtgccccccgatctggccatctgttgcttcgtcctggagcagtccctgtctgtgcgagccctgcaggagatgctggctaacacggtg

SEQ ID NO: 141 - DNA, 255 bp, Homo sapiens
aagctgacgggtcgcctcatgctggccgtgggaggagcagtgcttggctccctgcagtttggctacaacactggagtcatcaatgccccccagaaggtgatcgaggagttctacaaccagacatgggtccaccgctatggggagagcatcctgcccaccacgctcaccacgctctggtccctctcagtggccatcttttctgttgggggcatgattggctccttctctgtgggccttttcgttaaccgctttggc

SEQ ID NO: 142 - DNA, 255 bp, Homo sapiens
ggaagtaaaactgctgccccagtcacctcaacaggctcaacaacagcgacactagagggacaatcaactgcagcttcttcaaggacctctaatcaggacatatcagcttcatctcagaaccaccagactaagagcacggagaccaccagcaaagctcaaaccgacaccctcacgcagatgatgacatcaactcttttttcttccccaagtgtacacaatgtgatggagacagctcctccagatgaaatgaccaca

SEQ ID NO: 143 - DNA, 255 bp, Homo sapiens
ccttctgtccctccgactacaaccaacagcagccgagggacgaacagcaccttagccaagatcacaacctcagcgaagaccacgatgaagcccccaacagccacgcccacgactgcccggacgaggccgaccacagacgtgagtgcagatgctgccactgctgctaccaccaccaccaccatcgccagcactaccaccaccaccaccatcatcgtcaccaccaacactaccatcaccatcaccatcaccaccacc

SEQ ID NO: 144 - DNA, 255 bp, Homo sapiens
atggccgtcatggcgccccgaaccctcctcctgctactctcgggggccctggccctgacccagacctgggcgggctcccactccatgaggtatttcttcacatccgtgtcccggcccggccgcggggagccccgcttcatcgccgtgggctacgtggacgacacgcagttcgtgcggttcgacagcgacgccgcgagccagaggatggagccgcgggcgccgtggatagagcaggaggggccggagtattgggac

SEQ ID NO: 145 - DNA, 861 bp, Homo sapiens
atggtgggccagatgtactgctaccccggcagccacctggcccgggcgctgacgcgggcgctggcgctggccctggtgctggccctgctggtcgggccgttcctgagcggcctggcgggggcgatcccagcgccggggggccgctgggcgcgcgatgggcaggtccctccagcctcccgcagccgctcggtgctcctggacgtctcggcgggccagctgcttatggtggacggacgccaccctgacgccgtggcctgggccaacctcaccaacgccatccgcgagactgggtgggccttcctggagctgggcacaagtggccaatacaatgacagcttgcaggcctatgcagccggtgtggtggaggctgctgtgtcggaggagctcatctacatgcactggatgaacacggtggtgaattactgcggccccttcgagtatgaagtcggctactgcgagaggctgaagagcttcctggaggccaacctagagtggatgcaggaagagatggagtcaaacccagactcaccttactggcaccaggtgcggctgaccctcctgcagctgaaaggcctggaggacagctacgaaggccgtgtgagcttcccagctgggaagttcaccatcaaacccttggggttcctcctgctgcagctctctggggacctggaagacctggagctggccctgaacaagaccaagatcaaaccttctctgggctctggctcctgttctgccctcatcaagctgctccctggccagagtgacctcctggttgcccacaacacctggaacaactaccagcacatgctgcgtgtcatcaagaagtactggctccagttccgggaaggcccctggggt

SEQ ID NO: 146 - DNA, 255 bp, Homo sapiens
atgcaatggcgagcgctcgtcctggggctggtgctcctccggcttggcctccatggagtattgtggctcgtcttcgggctggggcccagcatgggcttctaccagcgctttccgctcagcttcggcttccagcgtctgaggagccccgacggccccgcgtcgcccacctcggggcccgtgggccggcctgggggggtatccgggccgtcgtggctgcagccgccggggaccggggcagcgcagagcccgcgcaag

SEQ ID NO: 147 - DNA, 255 bp, Homo sapiens
ggcgcgcggcgggcggcggcggccgcggcggcggctggggcgttcgcgggccggcgcgcggcgtgcggggccgtgctgctgacggagctgctggagcgcgccgctttctacggcatcacgtccaacctggtgctattcctgaacggggcgccgttctgctgggagggcgcgcaggccagcgaggcgctgctgctcttcatgggcctcacctacctgggctcgccgttcggaggctggctggccgacgcgcggctg

SEQ ID NO: 148 - DNA, 834 bp, Homo sapiens
atgggaaagtcttcagagtggtgcgagagaattgctgggatccagaagttcgtattagagaaatggaccaaaaaggccaaacctgaggacactttaaacctgtgccagcttttaaacaacgaccttgccagcaccgttgtgagctaccccaggaggttcgtgggtctggggacgttgcccatgcaggcccctgagctggcggtcaaggagatggagcgctgtgtgaaagagctgggctttcccggggtccaaattggcacccacgtcaacgagtgggacctgaacgcgcaggagctctttcctgtctatgcggcagccgaaaggctgaagtgttccctgttcgtgcatccctgggacatgcagatggatggacgaatggccaaatactggctcccttggcttgtaggaatgccagcagagaccaccatagccatttgctccatgatcatgggtggagtatttgagaagtttcccaaactgaaagtgtgtttcgcacatggtggtggtgccttccccttcacagtgggaagaatctcccatggattcagcatgcgcccagatctgtgtgcccaggacaaccccatgaacccgaagaaataccttggttccttttacacagatgctttggttcatgatcctctgtccctcaagctgttaacagatgtcataggaaaggataaagtcattttgggaaccgattacccctttccactaggtgagctggaacctgggaaactaatagagtccatggaagaatttgatgaagaaacaaagaataaactcaaagccggcaatgccctggcatttttgggtcttgagagaaaacaatttgaa

SEQ ID NO: 149 - DNA, 255 bp, Homo sapiens
atggcctggaccaagtaccagctgttcctggccgggctcatgcttgttaccggctccatcaacacgctctcggcaaaatgggcggacaatttcatggccgagggctgtggagggagcaaggagcacagcttccagcatcccttcctccaggcagtgggcatgttcctgggagaattctcctgcctggctgccttctacctcctccgatgcagagctgcagggcaatcagactccagcgtagacccccagcagccc

SEQ ID NO: 150 - DNA, 597 bp, Homo sapiens
atgagcgccgcccggccccagttcagcattgatgatgccttcgagctgtccctggaggacgggggccctgggcccgagtccagcggggtcgcgcgctttgggccgctgcacttcgagcgtcaggcccggttcgaggtggctgacgaagacaagcacaacccccctgagacctgtgttctgcaacagaacctggagaacgatgaggatggagcccaggcctctccggagccggatgggggagtcggcaccagggattccagccgaacttccatccgcagctcccagtggtccttcagcaccatcagcagcagcacccagcgctcctacaacacctgctgcagctggacccaacaccctttgatccagaagaaccgccgagtggtgctggcctccttcctgctcctgctgctggggctggtgctgatcctggtcggcgtgggactggaggcgaccccctctccaggtgtctccagcgccatcttcttcgtgccgggcttcctgttgttggtgcctggagtctatcacgtgatcttcatgtactgcgcggtcaagggccaccggggcttccagttcttctacctgccttacttcgagaag

SEQ ID NO: 151 - DNA, 642 bp, Homo sapiens
ctggcacctgtgtttgctctgtttgtaccattttactgctccataccaagagtccaagtggcacaaattctgggtccgttgtccatcacaaacaagacattgatttatatattgggactgcagcttttcacctctggttcctacatctggattgtagccataagtggacttatgtccggtctgtgctacgacagcaaaatgttccaggtgcatcaggtgctctgcatccccagctggatggcaaaattcttttcttggacacttgaacccatcttctcttcttcagaacccaccagcgaagccagaattgggatgggagccacgctggacatccagagacagcagagaatggagctgctggaccggcagctgatgttctctcagtttgcacaagggaggcgacagagacagcagcagggaggaatgatcaattggaatcgtctttttcctcctttacgtcagcgacaaaacgtaaactatcagggcggtcggcagtctgagccagcagcgccccctctagaagtttctgaggaacaggtcgcccggctcatggagatgggattttccagaggtgatgctttggaagccctgagagcttcaaacaatgacctcaatgtcgccaccaacttcctgctgcagcac

SEQ ID NO: 152 - DNA, 816 bp, Homo sapiens
atgtcctcgaccgagagcgccggccgcacggcggacaagtcgccgcgccagcaggtggaccgcctactcgtggggctgcgctggcggcggctggaggagccgctgggcttcatcaaagttctccagtggctctttgctattttcgccttcgggtcctgtggctcctacagcggggagacaggagcaatggttcgctgcaacaacgaagccaaggacgtgagctccatcatcgttgcatttggctatcccttcaggttgcaccggatccaatatgagatgcccctctgcgatgaagagtccagctccaagaccatgcacctcatgggggacttctctgcacccgccgagttcttcgtgacccttggcatcttttccttcttctataccatggctgccctagttatctacctgcgcttccacaacctctacacagagaacaaacgcttcccgctggtggacttctgtgtgactgtctccttcaccttcttctggctggtagctgcagctgcctggggcaagggcctgaccgatgtcaagggggccacacgaccatccagcttgacagcagccatgtcagtgtgccatggagaggaagcagtgtgcagtgccggggccacgccctctatgggcctggccaacatctccgtgctctttggctttatcaacttcttcctgtgggccgggaactgttggtttgtgttcaaggagaccccgtggcatggacagggccagggccaggaccaggaccaggaccaggaccagggccagggtcccagccaggagagtgcagctgagcagggagcagtggagaagcag

SEQ ID NO: 153 - DNA, 555 bp, Homo sapiens
atggccggcccaaggcctcggtggcgcgaccagctgctgttcatgagcatcatagtcctcgtgattgtggtcatctgcctgatgttttacgctcttctctgggaggctggcaacctcactgacctgcccaacctgagaatcggcttctataacttctgcctgtggaatgaggacaccagcaccctacagtgtcaccagttccctgagctggaagccctgggggtgcctcgggttggcctgggcctggccaggcttggcgtgtacgggtccctggtcctcaccctctttgccccccagcctctcctcctagcccagtgcaacagtgatgagagagcgtggcggctggcagtgggcttcctggctgtgtcctctgtgctgctggcaggcggcctgggcctcttcctctcctatgtgtggaagtgggtcaggctctccctcccggggcctgggtttctagctctgggcagcgcccaggccttactcatcctcttgcttatagccatggctgtgttccctctgagggctgagagggctgagagcaagcttgagagctgc

SEQ ID NO: 154 - DNA, 255 bp, Homo sapiens
agcgccacggcccggggcgcccaccagcccgacaacaccgccttcactcagcagcgcctccccgcctggcagccgctgctgtcggccagcatcgcgctgccgctcttcttctgcgcgggcctggccttcatcggcctgggcctgggcctctactactcctccaacggcatcaaggagctggagtacgactatacaggcgacccgggcaccggtaactgctcggtgtgcgccgcggctggccagggccgggcgctg

SEQ ID NO: 155 - DNA, 909 bp, Homo sapiens
atgggtcggcccctgctgctgcccctactgcccttgctgctgccgccagcatttctgcagcctagtggctccacaggatctggtccaagctacctttatggggtcactcaaccaaaacacctctcagcctccatgggtggctctgtggaaatccccttctccttctattacccctgggagttagccacagctcccgacgtgagaatatcctggagacggggccacttccacaggcagtccttctacagcacaaggccgccttccattcacaaggattatgtgaaccggctctttctgaactggacagagggtcagaagagcggcttcctcaggatctccaacctgcagaagcaggaccagtctgtgtatttctgccgagttgagctggacacacggagctcagggaggcagcagtggcagtccatcgaggggaccaaactctccatcacccaggctgtcacgaccaccacccagaggcccagcagcatgactaccacctggaggctcagtagcacaaccaccacaaccggcctcagggtcacacagggcaaacgacgctcagactcttggcacataagtctggagactgctgtgggggtggcagtggctgtcactgtgctcggaatcatgattttgggactgatctgcctcctcaggtggaggagaaggaaaggtcagcagcggactaaagccacaaccccagccagggaacccttccaaaacacagaggagccatatgagaatatcaggaatgaaggacaaaatacagatcccaagctaaatcccaaggatgacggcatcgtctatgcttcccttgccctctccagctccacctcacccagagcacctcccagccaccgtcccctcaagagcccccagaacgagaccctgtactctgtcttaaaggcc

SEQ ID NO: 156 - DNA, 255 bp, Homo sapiens
atggggacctgtgacattgtgactgaagccaatatctcatctggccctgagagcaacaccacgggcatcacagccttctccatgcccagctggcaactggcactgtgggccacagcctacctggccctggtgctggtggccgtgacgggtaatgccatcgtcatctggatcatcctggcccatcggaggatgcgcacagtcaccaactacttcatcgtcaatctggcgctggctgacctctgcatggctgccttc

SEQ ID NO: 157 - DNA, 255 bp, Homo sapiens
atgcggacgctgctgcctcccgcgctgctgacctgctggctgctcgcccccgtgaacagcattcacccagaatgccgatttcatctggaaatacaggaggaagaaacaaaatgtgcagagcttctgaggtctcaaacagaaaaacacaaagcctgcagtggcgtctgggacaacatcacgtgctggcggcctgccaatgtgggagagaccgtcacggtgccctgcccaaaagtcttcagcaatttttacagcaaa

SEQ ID NO: 158 - DNA, 255 bp, Homo sapiens
atggggctgggcccggtcttcctgcttctggctggcatcttcccttttgcacctccgggagctgctgctgagccccacagtcttcgttataacctcacggtgctgtcctgggatggatctgtgcagtcagggtttcttgctgaggtacatctggatggtcagcccttcctgcgctatgacaggcagaaatgcagggcaaagccccagggacagtgggcagaagatgtcctgggaaataagacatgggacagagag

SEQ ID NO: 159 - DNA, 255 bp, Homo sapiens
agagtgtctcctctgcagaagtctgagatagtggatgtggtgaagaagcgggtgaaggccatcaccctcgccatcggagacggcgccaacgatgtcgggatgatccagacagcccacgtgggtgtgggaatcagtgggaatgaaggcatgcaggccaccaacaactcggattacgccatcgcacagttttcctacttagagaagcttctgttggttcatggagcctggagctacaaccgggtgaccaagtgcatc

SEQ ID NO: 160 - DNA, 255 bp, Homo sapiens
atggtggacctctcagtctccccagactccttgaagccagtatcgctgaccagcagtcttgtcttcctcatgcacctcctcctccttcagcctggggagccgagctcagaggtcaaggtgctaggccctgagtatcccatcctggccctcgtcggggaggaggtggagttcccgtgccacctatggccacagctggatgcccagcaaatggagatccgctggttccggagtcagaccttcaatgtggtacacctg

SEQ ID NO: 161 - DNA, 255 bp, Homo sapiens
atggcggggctctggctggggctcgtgtggcagaagctgctgctgtggggcgcggcgagtgccgtttccctggccggcgccagtctggtcctgagcctgctgcagagggtggcgagctacgcgcggaaatggcagcagatgcggcccatccccacggtggcccgcgcctacccactggtgggccacgcgctgctgatgaagccggacgggcgagaattttttcagcagatcattgagtacacagaggaataccgc

SEQ ID NO: 162 - DNA, 255 bp, Homo sapiens
atgaatgctaataaagatgaaagacttaaagccagaagccaagattttcacctttttcctgctttgatgatgctaagcatgaccatgttgtttcttccagtcactggcactttgaagcaaaatattccaagactcaagctaacctacaaagacttgctgctttcaaatagctgtattccctttttgggttcatcagaaggactggattttcaaactcttctcttagatgaggaaagaggcaggctgctcttggga

SEQ ID NO: 163 - DNA, 255 bp, Homo sapiens
atggcttcagtggcctgggccgtcctcaaggtgctgctgcttctccccactcagacttggagccccgtgggagcaggaaatccacctgactgtgatgccccactggcctctgccttgcctaggtcatccttcagcagctcctcagagctgtccagcagccacggcccggggttttcaaggcttaatcgaagagatggagctggtggctggactccacttgtgtcaaataaataccaatggctgcaaattgacctt

SEQ ID NO: 164 - DNA, 750 bp, Homo sapiens
atgaattcgatgacttcagcagttccggtggccaattctgtgttggtggtggcaccccacaatggttatcctgtgaccccaggaattatgtctcacgtgcccctgtatccaaacagccagccgcaagtccacctagttcctgggaacccacctagtttggtgtcgaatgtgaatgggcagcctgtgcagaaagctctgaaagaaggcaaaaccttgggggccatccagatcatcattggcctggctcacatcggcctcggctccatcatggcgacggttctcgtaggggaatacctgtctatttcattctacggaggctttcccttctggggaggcttgtggtttatcatttcaggatctctctccgtggcagcagaaaatcagccatattcttattgcctgctgtctggcagtttgggcttgaacatcgtcagtgcaatctgctctgcagttggagtcatactcttcatcacagatctaagtattccccacccatatgcctaccccgactattatccttacgcctggggtgtgaaccctggaatggcgatttctggcgtgctgctggtcttctgcctcctggagtttggcatcgcatgcgcatcttcccactttggctgccagttggtctgctgtcaatcaagcaatgtgagtgtcatctatccaaacatctatgcagcaaacccagtgatcaccccagaaccggtgacctcaccaccaagttattccagtgagatccaagcaaataag

SEQ ID NO: 165 - DNA, 255 bp, Homo sapiens
atgatggatcaagctagatcagcattctctaacttgtttggtggagaaccattgtcatatacccggttcagcctggctcggcaagtagatggcgataacagtcatgtggagatgaaacttgctgtagatgaagaagaaaatgctgacaataacacaaaggccaatgtcacaaaaccaaaaaggtgtagtggaagtatctgctatgggactattgctgtgatcgtctttttcttgattggatttatgattggctac

SEQ ID NO: 166 - DNA, 255 bp, Homo sapiens
atgcccaacaacagcactgctctgtcattggccaatgttacctacatcaccatggaaattttcattggactctgcgccatagtgggcaacgtgctggtcatctgcgtggtcaagctgaaccccagcctgcagaccaccaccttctatttcattgtctctctagccctggctgacattgctgttggggtgctggtcatgcctttggccattgttgtcagcctgggcatcacaatccacttctacagctgccttttt

SEQ ID NO: 167 - DNA, 255 bp, Homo sapiens
atggcgtctgccgagcccctgacggcgctgtcccgctggtacctgtatgccatccacggctacttctgcgaggtgatgttcacagcggcctgggagttcgtggtgaacttgaactggaagttccctggggtcacgagcgtgtgggccctcttcatctacggcacctccatcctcatcgtggagcgcatgtacctgcggctgcgcggccgctgcccgctgctcctgcgctgcctcatctacacgctctggacctac

SEQ ID NO: 168 - DNA, 864 bp, Homo sapiens
atgacactattaaaaattgcccttttttcccaagctggtattggactcacagccaacaccttcctccttttcttctgtatctgcacactccctctggactgcaggcctaagcccactgacctcatcacctgtcacctggcccttgtccacttagtgatgctcctcactgtgagcttcttggcatctctggacctctttgagtcacagtattttcagaatgacttcaagtgtaaggtattcttctacatgcatagagggatggggctctccatctgcaccacctgcctccggagtgtgctccaggctgtcaccattacccccggcacctcctggtttaaacataaatcttcaaattacattatccatgttttcttcttcttatggttcctcaacttgtctttcagtagtaacaggatcttctacactgtagctgcttccagtgtgagccagacaaatgtactgaatataggtaagtactgctcagttttctccatgagcttcatcctcagggccacgtttcttattctgacaacacttagggatgctttcctggtaggaatactgctgttcttaattgcatacatggtgactctcttattcaggcctcagagcaatggtccttccccaggagcttcccctgagaaacgggccatccagaccatactgctgctggtaagtttctctgtggtcctctgttgggtggatttcatcatctccttctcctcagcaatgttgtgggcatatggcccaatcaaccagcaagttcagagtcttgtagtcaatgtctatgccgtgatcagtcctctggtgctcctcacttcagataaaagaagaaccaatattctgaaaaatacacaacagaag

SEQ ID NO: 169 - DNA, 837 bp, Homo sapiens
atgacactattaaaaattgcccttttttcccaagctggtattggactcacagccaacaccttcctccttttcttctgtatctgcacactccctctggactgcaggcctaagcccactgacctcatcacctgtcacctggcccttgtccacttagtgatgctcctcactgtgagcttcttggcatctctggacctctttgagtcacagtattttcagaatgacttcaagtgtaagctattattttacacaaaaagggtgataagaggcatctccctctgtcccccctggctcttgagtgtgctccaggccatcaccgtcagtcccagaaactcatggttggcaaggtttaaacataaatttacaaattacattaccaatgtttttcttcttttttggttcttcaatttgtcttttagtagcagcctaatcttcttcactgtgtatttttcaaatgtgactcagactgatctattgaatgtcagtaaacactgctcacttttccccatgaacctcatcatcggagtgaaattatccagggatgccttccttgtcagagttatgctgctctcaagtgcattcatgtggatcctctttttcagaaatcagaagcaatcccagctccacagcaccagcatctctccaagaatctcctcagagaaaagggccacccagaccatcctgctgttaagttgctttgtggtcatgtatcctatgaaccttcttatttcaacatcctcaatcctgttatgggtgtatgacccagttgtcctgaatttccggaggcttgtgctcaatgcatatgccactgttattccactgggacaaattagttctgat

SEQ ID NO: 170 - DNA, 255 bp, Homo sapiens
atgcgagcgcggccgcggccccggccgctctgggcgactgtgctggcgctgggggcgctggcgggcgttggcgtaggagggcccaacatctgtaccacgcgaggtgtgagctcctgccagcagtgcctggctgtgagccccatgtgtgcctggtgctctgatgaggccctgcctctgggctcacctcgctgtgacctgaaggagaatctgctgaaggataactgtgccccagaatccatcgagttcccagtgagt

SEQ ID NO: 171 - DNA, 255 bp, Homo sapiens
gtgatgttgcaaactctgatctggtgcaagaactgcaaaaaggaggttcacgcttgtcgaaagtcctacgattgcggggagcggaatgtggaagttcctcaaatggaagacatgatcctggactgtgagttaaactggcatcaggcttcggaaggcctcactgattacagcttttacagggtttgggggaacaatacggagaccttggtgtccaaggggaaagaggccaccctgaccaagcccatggtgggtcca

SEQ ID NO: 172 - DNA, 255 bp, Homo sapiens
atgatgatgatgatgatgatgaaaaaaatgcagcatcaacggcagcagcaagcggaccacgcgaacgaggcaaactatgcaagaggcaccagacttcctctttctggtgaaggaccaacttctcagccgaatagctccaagcaaactgtcctgtcttggcaagctgcaatcgatgctgctagacaggccaaggctgcccaaactatgagcacctctgcacccccacctgtaggatctctctcccaaagaaaacgt

SEQ ID NO: 173 - DNA, 255 bp, Homo sapiens
atgttgacaagactgcaagttcttaccttagctttgttttcaaagggatttttactctctttaggggaccataactttctaaggagagagattaaaatagaaggtgaccttgttttagggggcctgtttcctattaacgaaaaaggcactggaactgaagaatgtgggcgaatcaatgaagaccgagggattcaacgcctggaagccatgttgtttgctattgatgaaatcaacaaagatgattacttgctacca

SEQ ID NO: 174 - DNA, 255 bp, Homo sapiens
attgccacggcagtgaagtttctacagaattcccgggtccgccagagcccacttgcaaccaggagagcattcctaaagaagaaagggctgacagatgaagagattgatatggccttccagcagtcgggcactgctgccgatgagccttcgtccttgggcccagccacacaggtggttcctgtccagccccctcacctcatatctcagccatacagtcccgcaggctcccgatggcgagattacggcgccctggcc

SEQ ID NO: 175 - DNA, 255 bp, Homo sapiens
actgacaacacaccattcaccagtgtcaaccacatggtcctggacagcatttacttcagccggaggttccatgtgcgttgtgtggccaaggctgtggacaaggtgggccatgtggggacccccttaaggagcaacattgttaccattggaacagacagtgctatctgccacacaccagtggtggctgggacatccagaggcttccaggctcagtccttcatcgcaaccttgaaatacctggatgtcaaacataag

SEQ ID NO: 176 - DNA, 255 bp, Homo sapiens
atggcctcggctggtaacgccgccgagccccaggaccgcggcggcggcggcagcggctgtatcggtgccccgggacggccggctggaggcgggaggcgcagacggacgggggggctgcgccgtgctgccgcgccggaccgggactatctgcaccggcccagctactgcgacgccgccttcgctctggagcagatttccaaggggaaggctactggccggaaagcgccgctgtggctgagagcgaagtttcagaga

SEQ ID NO: 177 - DNA, 426 bp, Homo sapiens
aagtatgcaggaagcaggcggtcaatgcctctgggagcaaggatccttttccacggtgtgttctatgccgggggctttgccattgtgtattacctcattcaaaagtttcattccagggctttatattacaagttggcagtggagcagctgcagagccatcccgaggcacaggaagctctgggccctcctctcaacatccattatctcaagctcatcgacagggaaaacttcgtggacattgttgatgccaagttgaagattcctgtctctggatccaaatcagagggccttctctacgtccactcatccagaggtggcccctttcagaggtggcaccttgacgaggtctttttagagctcaaggatggtcagcagattcctgtgttcaagctcagtggggaaaacggtgatgaagtgaaaaaggag

SEQ ID NO: 178 - DNA, 255 bp, Homo sapiens
atggcccgtgcccaggcgctcgtgctggcactcaccttccagctctgcgcgccggagaccgagactccggcagctggctgcaccttcgaggaggcaagtgacccagcagtgccctgcgagtacagccaggcccagtacgatgacttccagtgggagcaagtgcgaatccaccctggcacccgggcacctgcggacctgccccacggctcctacttgatggtcaacacttcccagcatgccccaggccagcgagcc

SEQ ID NO: 179 - DNA, 255 bp, Homo sapiens
atgtcgctcgtgctgctaagcctggccgcgctgtgcaggagcgccgtaccccgagagccgaccgttcaatgtggctctgaaactgggccatctccagagtggatgctacaacatgatctaatccccggagacttgagggacctccgagtagaacctgttacaactagtgttgcaacaggggactattcaattttgatgaatgtaagctgggtactccgggcagatgccagcatccgcttgttgaaggccaccaag

SEQ ID NO: 180 - DNA, 255 bp, Homo sapiens
atggctctcagcctctggcccctgctgctgctgctgctgctgctgctgctgctgtcctttgcagtgactctggcccctactgggcctcattccctggaccctggtctctccttcctgaagtcattgctctccactctggaccaggctccccagggctccctgagccgctcacggttctttacattcctggccaacatttcttcttcctttgagcctgggagaatgggggaaggaccagtaggagagcccccacct

SEQ ID NO: 181 - DNA, 255 bp, Homo sapiens
atgcgaccctccgggacggccggggcagcgctcctggcgctgctggctgcgctctgcccggcgagtcgggctctggaggaaaagaaagtttgccaaggcacgagtaacaagctcacgcagttgggcacttttgaagatcattttctcagcctccagaggatgttcaataactgtgaggtggtccttgggaatttggaaattacctatgtgcagaggaattatgatctttccttcttaaagaccatccaggaggtg

SEQ ID NO: 182 - DNA, 255 bp, Homo sapiens
atgcccaaaaatagcaaggtggtaaaaagagaattagatgatgatgttactgagtctgtcaaagaccttctttccaatgaagacgcagctgatgatgcttttaagacaagtgaactaattgttgatggccaggaagagaaagatacagatgttgaagaaggatctgaagtcgaagatgaaagaccagcttggaacagtaaactacaatacatcctggcccaagttggattttctgtaggtttaggaaatgtgtgg

SEQ ID NO: 183 - DNA, 255 bp, Homo sapiens
aatgccaattcctgtccagttgatcgaactctatttaagtgcatttgtattcgagctcaatttggtggtaaaatcttaagaaagatcccagtggagaacaccaaagcgagcgaggaggaggaggacccgaccttctgtgaggtgtgcggcaggagcgaccgtgaggacaggcttttgctctgcgacggctgcgatgcgggggttcctgggagcgtctgctgccagttgccccggcaggcactgagttggttgctg

SEQ ID NO: 184 - DNA, 255 bp, Homo sapiens
cttttcttcctcttccttttggcagctttcagccgtgccccaattccaatggctgtggtccgcagagagctatcctgtgagagctatcctatagagcttcgctgtccaggaacagacgtcatcatgatagaaagtgccaactatggcaggactgatgacaaaatttgtgactctgaccctgctcagatggagaatatccgatgttatctgccagatgcctataagattatgtctcaaagatgcaataacagaacc

SEQ ID NO: 185 - DNA, 255 bp, Homo sapiens
atgggcgcactggcccgggcgctgctgctgcctctgctggcccagtggctcctgcgcgccgccccggagctggcccccgcgcccttcacgctgcccctccgggtggccgcggccacgaaccgcgtagttgcgcccaccccgggacccgggacccctgccgagcgccacgccgacggcttggcgctcgccctggagcctgccctggcgtcccccgcgggcgccgccaacttcttggccatggtagacaacctgcag

SEQ ID NO: 186 - DNA, 255 bp, Homo sapiens
atgcagcttaaaataatgccgaaaaagaagcgcttatctgcgggcagagtgcccctgattctcttcctgtgccagatgattagtgcactggaagtacctcttgatctggtacagcctccaaccatcacccaacagtctccaaaagattacattattgaccctcgggagaatattgtaatccagtgtgaagccaaagggaaaccgcccccaagcttttcctggacccgtaatgggactcattttgacatcgataaa

SEQ ID NO: 187 - DNA, 255 bp, Homo sapiens
atgacggcggagaaggcgctgcccctgggcaatgggaaggctgctgaggaggcgcgggagtccgaggcgccgggtggcggctgcagcagcgggggcgcggcgcccgcgcgccacccgcgcgtcaagcgcgacaaggcggtccacgagcgcggccactggaacaacaaggtggagttcgtgctgagcgtggccggggagatcattgggctgggcaacgtgtggcgcttcccctacctgtgctacaagaacggagga

SEQ ID NO: 188 - DNA, 255 bp, Homo sapiens
atggatcttgaggcggcaaagaacggaacagcctggcgccccacgagcgcggagggcgactttgaactgggcatcagcagcaaacaaaaaaggaaaaaaacgaagacagtgaaaatgattggagtattaacattgtttcgatactccgattggcaggataaattgtttatgtcgctgggtaccatcatggccatagctcacggatcaggtctccccctcatgatgatagtatttggagagatgactgacaaattt

SEQ ID NO: 189 - DNA, 255 bp, Homo sapiens
cctgtaaatgaaaatatgcaagtcaacaaaataaagaaaaatgaagatgctaagaaaagactgtctgttgaaagaatctatcaaaagaaaacacaattggaacatattttgctccgcccagacacctacattggttctgtggaattagtgacccagcaaatgtgggtttacgatgaagatgttggcattaactatagggaagtcacttttgttcctggtttgtacaaaatctttgatgagattctagttaatgct

SEQ ID NO: 190 - DNA, 255 bp, Homo sapiens
ggtctcccccagccgatagtgatggaggcactggacgaggctgaagggctcaaggactcacagagagagatgccacacactcctacctcgccgccctcagatccagctcagaagccaccacctcgaggcgctgggagccactccctcactgtcaggagcagcctgtgcctgttcgctgcctcacagttcctgcttgcctgtggggtgctctggttcagcggttatggccacatctggtcacagaacgccacaaac

SEQ ID NO: 191 - DNA, 255 bp, Homo sapiens
atgcgggactacgacgaggtgatcgccttcctgggcgagtgggggcccttccagcgcctcatcttcttcctgctcagcgccagcatcatccccaatggcttcaatggtatgtcagtcgtgttcctggcggggaccccggagcaccgctgtcgagtgccggacgccgcgaacctgagcagcgcctggcgcaacaacagtgtcccgctgcggctgcgggacggccgcgaggtgccccacagctgcagccgctaccgg

SEQ ID NO: 192 - DNA, 255 bp, Homo sapiens
atgcgccgcgccagcagagactacaccaagtacctgcgtggctcggaggagatgggcggcggccccggagccccgcacgagggccccctgcacgccccgccgccgcctgcgccgcaccagccccctgccgcctcccgctccatgttcgtggccctcctggggctggggctgggccaggttgtctgcagcgtcgccctgttcttctatttcagagcgcagatggatcctaatagaatatcagaagatggcactcac

SEQ ID NO: 193 - DNA, 255 bp, Homo sapiens
atgggagacaatataacatccatcagagagttcctcctactgggatttcccgttggcccaaggattcagatgctcctctttgggctcttctccctgttctacgtcttcaccctgctggggaacgggaccatactggggctcatctcactggactccagactgcacgcccccatgtacttcttcctctcacacctggcggtcgtcgacatcgcctacgcctgcaacacggtgccccggatgctggtgaacctcctg

SEQ ID NO: 194 - DNA, 255 bp, Homo sapiens
atggaccgcggcacgctccctctggctgttgccctgctgctggccagctgcagcctcagccccacaagtcttgcagaaacagtccattgtgaccttcagcctgtgggccccgagaggggcgaggtgacatataccactagccaggtctcgaagggctgcgtggctcaggcccccaatgccatccttgaagtccatgtcctcttcctggagttcccaacgggcccgtcacagctggagctgactctccaggcatcc

SEQ ID NO: 195 - DNA, 891 bp, Homo sapiens
aagcggcctagtcctccggctccgacagctgggtgtccaggccatggggcagccctgggcggctgggagcacggacggggcgcccgcgcagctgcctctcgtgctcaccgcgctgtgggccgcggccgtgggcctggagctggcttacgtgctggtgctcggtcccgggccgccgccgctgggacccctggcccgggccttgcagctggcgctgccttccagctgctcaacctgctgggcaacgtggggctcttcctgcgctcggatcccagcatccgtggcgtgatgctggccggccgcggtctgggccagggctgggcttactgctaccaatgccaaagccaggtgccgccacgcagcggacactgctctgcctgccgcgtctgcatcctgcgtcgggaccaccactgccgcctgctgggccgctgcgtgggcttcggcaactaccggcccttcctgtgcctgctgcttcatgccgccggcgtcctgctccacgtctctgtgctgctgggccctgcactgtcggccctgctgcgagcccacacgcccctccacatggctgccctcctcctgcttccctggctcatgttgctcacaggcagagtgtctctggcacagtttgccttggccttcgtgacggacacgtgcgtggcgggtgcgctgctgtgcggggctgggctgctcttccatgggatgctgctgctgcggggccagaccacatgggagtgggctcggggccagcactcctatgacctgggtccctgccacaacctgcaggcagccctggggccccgctgggccctcgtctggctctggcccttcctggcctccccattgcctggggatgggatcaccttccagaccacagcagatgtgggacacacagcctcc

SEQ ID NO: 196 - DNA, 255 bp, Homo sapiens
gatgacatctgtgattactttggtgtgaaaattgccatgtacttcgcctggctgggcttctacacgtcggctatggtatacccagctgtcttcgggtctgtcctgtacacattcacagaggctgatcagacaagccgggatgtttcctgcgtggtctttgccctcttcaacgtgatctggtcgacgctgttcctagaggaatggaagcggagaggggctgagctggcatataagtgggggacgctggactcacct

SEQ ID NO: 197 - DNA, 255 bp, Homo sapiens
ttcctgctgatcttggcactgaccgaagcgctggcatttgccatccaggaaccatctcccagggaatctcttcaggtcctcccttcaggcactcccccgggaaccatggtgacagcaccccacagctctaccagacatacttctgtggtgatgctgacccccaatcccgatggacccccctcacaggctgcagctcccatggcaacaccgacaccccgtgcagaggggcaccctcctacgcacaccatctccacc

SEQ ID NO: 198 - DNA, 255 bp, Homo sapiens
atggcctggcggggcgcagggccgagcgtcccgggggcgcccgggggcgtcggtctcagtctggggttgctcctgcagttgctgctgctcctggggccggcgcggggcttcggggacgaggaagagcggcgctgcgaccccatccgcatctccatgtgccagaacctcggctacaacgtgaccaagatgcccaacctggttgggcacgagctgcagacggacgccgagctgcagctgacaactttcacaccgctc

SEQ ID NO: 199 - DNA, 627 bp, Homo sapiens
atggaaggaggcgggggaagcggcaacaaaaccacagggggattggccggctttttcggagccggcggagcaggttactcgcacgcggatttggctggcgtcccgctaactggtatgaaccctctgtctccttatttaaatgtggatccacgatacctcgtgcaggatacagatgagtttattttacctaccggagctaataaaacccggggcagatttgagctggccttctttacgattggaggatgttgcatgacaggggctgcgtttggtgcaatgaatggtcttcggctaggattgaaggaaacccagaacatggcctggtccaaaccaagaaatgtacagattttgaatatggtgactaggcaaggggcactttgggctaatactctaggttctctggctttgctctatagtgcatttggtgtcatcattgagaaaacacgaggtgcagaagatgaccttaacacagtagcagctggaaccatgacaggcatgttgtataaatgtacaggtggtcttcgagggatagcacgaggtggtctgacaggactaacacttaccagcctctatgcactatataataactgggagcacatgaaaggctccttgctccaacagtcactc

SEQ ID NO: 200 - DNA, 255 bp, Homo sapiens
atgcgtccccacctgtcgccgccgctgcagcagctactactgccggtgctgctcgcctgcgccgcgcactcgactggagcccttccccgactatgtgacgtgctacaagtgctgtgggaagagcaagaccagtgcctgcaggaactctccagagagcagacaggagacctgggcacggagcagccagtgccaggttgtgaggggatgtgggacaacataagctgctggccctcttctgtgccgggccggatggtg

SEQ ID NO: 201 - DNA, 255 bp, Homo sapiens
atggcgagcggccgggacgagcggccgccttggcggctagggcggctcctgttgctcatgtgcctgctgctgctggggagctcggcccgggcggctcacatcaagaaggcggaggcgactaccacaactacgagcgcgggcgccgaggcggccgagggccagttcgaccgctactaccacgaagaggagttggagtcggcgctgagggaggcggcggccgcgggcctccccggcctggcccgcctctttagcatc

SEQ ID NO: 202 - DNA, 255 bp, Homo sapiens
actaagaaaagaattgctgtgattgggggaggagtgagcgggctctcttccatcaagtgctgcgtagaagaaggcttggaacctgtctgctttgaaaggactgatgacatcggagggctctggaggttccaggaaaatcctgaagaaggaagggccagtatttacaaatcagtgatcatcaatacttctaaagagatgatgtgcttcagtgactatccaatcccagatcattatcccaacttcatgcataatgcc

SEQ ID NO: 203 - DNA, 255 bp, Homo sapiens
gaggatgaagtggtactccagtgcatcgccaccattcataaggagcagaggaagttctgcctggcagccgagggacttgggaatcgcctgtgcttcttggaacccacttcagaagccaagtacattcctccagatctctgcgtctgcaattttgtgctggaacagtccctatctgtcagagccctgcaggaaatgcttgccaacacaggtgaaaatggcggcgaaggggcagcacaaggaggtggccacaggacc

SEQ ID NO: 204 - DNA, 255 bp, Homo sapiens
cctgaattcctgaagcagcctactaatatatatgctcacgaatctatggatattgtatttgaatgtgaagtgactggaaaaccaactccaactgtgaagtgggtcaaaaatggggatatggttatcccaagtgattattttaagattgtaaaggaacataatcttcaagttttgggtctggtgaaatcagatgaagggttctatcagtgcattgctgaaaatgatgttggaaatgcacaagctggagcccaactg

SEQ ID NO: 205 - DNA, 255 bp, Homo sapiens
atggcgccgccgccgccgcccgtgctgcccgtgctgctgctcctggccgccgccgccgccctgccggcgatggggctgcgagcggccgcctgggagccgcgcgtacccggcgggacccgcgccttcgccctccggcccggctgtacctacgcggtgggcgccgcttgcacgccccgggcgccgcgggagctgctggacgtgggccgcgatgggcggctggcaggacgtcggcgcgtctcgggcgcggggcgcccg

SEQ ID NO: 206 - DNA, 255 bp, Homo sapiens
atgataatcacacaaacaagtcactgttacatgaccagccttgggattcttttcctgattaatattctccctggaaccactggtcaaggggaatcaagacgacaagaacccggggactttgtgaagcaggacattggcgggctgtctcctaagcatgccccagatattcctgatgacagcactgacaacatcactatcttcaccagaatcttggatcgtcttctggacggctatgacaaccggctgcgacctggg

SEQ ID NO: 207 - DNA, 255 bp, Homo sapiens
atggtggctgcagcggcggcaactgaggcaaggctgaggaggaggacggcggcgacggcagcgctcgcgggcaggagcggcgggccgcactgggactgggacgtgaccagggctgggaggccggggctgggggccgggctgcgcctcccgcggctgctgtctccaccgctgcggccacggctgctgctgctgctgttgttgctctcgccgccgctgctgctgctgctgctgccctgtgaggccgaggccgcggcg

SEQ ID NO: 208 - DNA, 255 bp, Homo sapiens
atgcaattatgtattttttgttgttgttgtattttattttattttgatttgtatgactttggaagagggtatgattttaccattcaagaaaatggacttcagatagatcaacctcctgaaataggaaacatctccattgttcgcatcataataatgaaaaatgataacgcagaaggcatcattgaatttgacccaaagtatactgccttcgaagtggaggaagatgttgggctgatcatgatcccagtggtgagg

SEQ ID NO: 209 - DNA, 795 bp, Homo sapiens
atgaacatgtcagtgttgactttacaagaatatgaattcgaaaagcagttcaacgagaatgaagccatccaatggatgcaggaaaactggaagaaatctttcctgttttctgctctgtatgctgcctttatattcggtggtcggcacctaatgaataaacgagcaaagtttgaactgaggaagccattagtgctctggtctctgacccttgcagtcttcagtatattcggtgctcttcgaactggtgcttatatggtgtacattttgatgaccaaaggcctgaagcagtcagtttgtgaccagggtttttacaatggacctgtcagcaaattctgggcttatgcatttgtgctaagcaaagcacccgaactaggagatacaatattcattattctgaggaagcagaagctgatcttcctgcactggtatcaccacatcactgtgctcctgtactcttggtactcctacaaagacatggttgccgggggaggttggttcatgactatgaactatggcgtgcacgccgtgatgtactcttactatgccttgcgggcggcaggtttccgagtctcccggaagtttgccatgttcatcaccttgtcccagatcactcagatgctgatgggctgtgtggttaactacctggtcttctgctggatgcagcatgaccagtgtcactctcactttcagaacatcttctggtcctcactcatgtacctcagctaccttgtgctcttctgccatttcttctttgaggcctacatcggcaaaatgaggaaaacaacgaaagctgaa

SEQ ID NO: 210 - DNA, 255 bp, Homo sapiens
atgaggaagagaaagatcagtgtgtgtcaacaaacttgggccttattatgcaagaactttcttaaaaaatggagaatgaaaagagagtccttaatggaatggctgaattcattgctcctactactttgtttgtatatatatcctcatagtcatcaagtaaatgatttttcttcactgcttaccatggacctgggacgggtagatacatttaatgaatccagattttctgttgtatacacacctgtcaccaacacg

SEQ ID NO: 211 - DNA, 255 bp, Homo sapiens
atggacacttctgggcacttccatgactcgggggtgggggacttggatgaagaccccaagtgcccctgtccatcctctggggatgagcagcagcagcagcagcagcagcaacagcagcagcagccaccaccgccagcgccaccagcagccccccagcagcccctgggaccctcgctgcagcctcagcctccgcagcttcagcagcagcagcagcagcagcagcagcagcagcagcagcagccaccgcatcccctg

SEQ ID NO: 212 - DNA, 255 bp, Homo sapiens
atggttatttctttgaactcatgcctgagctttatttgtttattgttatgccactggattgggacagcatcacctctgaatcttgaagaccctaatgtgtgtagccactgggaaagctactcagtgactgtgcaagagtcatacccacatccctttgatcaaatttactacacgagctgcactgacattctaaactggtttaaatgcacgcggcacagagtcagctatcggacagcctatcgacatggggagaag

SEQ ID NO: 213 - DNA, 255 bp, Homo sapiens
atggggagaggaggaggggggttggacgtgggaggaggaggagagggctcgagggaccgtctgtcgcgggacgggctggccagctggggcgcggagcctggaggaggaggcagcggcagcggcagcagcagccctccgagcagcagcagctgcagcagcagaaacaagtaccagccacaaagcggctcctctggcccaagcagccacagtccccccgccgcgatggcgctgcaaagccaggcgagcgaggaagca

SEQ ID NO: 214 - DNA, 255 bp, Homo sapiens
atggagagcgctctccccgccgccggcttcctgtactgggtcggcgcgggcaccgtggcctacctagccctgcgtatttcgtactcgctcttcacggccctccgggtctggggagtggggaatgagggggtcggcccggggctcggagaatgggcagttgtcacaggtagtactgatggaattggaaaatcatatgcagaagaggtagcaaagcatggaatgaaggttgtccttatcagcagatcaaaggataaa

SEQ ID NO: 215 - DNA, 255 bp, Homo sapiens
atgtttcgacagttttatctctggacatgtttagcttcagggatcatcctgggctctctctttgaaatctgcttgggccagtatgatgatgattgcaaactagctaggggaggaccaccagctaccatagttgctattgatgaagaaagtcggaatggtacaattctggtggacaacatgctgatcaaagggactgctggaggaccagaccccaccatagaactttctttaaaggataatgtggattactgggtg

SEQ ID NO: 216 - DNA, 255 bp, Homo sapiens
atgaggcagtctctcctattcctgaccagcgtggttcctttcgtgctggcgccgcgacctccggatgacccgggcttcggcccccaccagagactcgagaagcttgattctttgctctcagactacgatattctctctttatctaatatccagcagcattcggtaagaaaaagagatctacagacttcaacacatgtagaaacactactaactttttcagctttgaaaaggcattttaaattatacctgacatca

SEQ ID NO: 217 - DNA, 255 bp, Homo sapiens
atgcggagagcagtctgcttccctgcgctgtgcctgctccttaatcttcacgctgcagggtgcttttcaggaaacaatgatcattttttggcaattaatcagaagaagagtgggaagccggtattcatttataagcattcacaagacattgagaagagcctggatatagccccacaaaaaatctacagacatagctaccattcctcttccgaagctcaagtaagcaaacgccaccagattgtcaattcagcattt

SEQ ID NO: 218 - DNA, 255 bp, Homo sapiens
tggcaagaaacaatcaatcaaatagataacaaattagaaggaattttgggtgacatacttctttcagcagcgtgcattgtctacagtggaattttaacaccagaatttcgccagttgattgtgaataaatgggagacattctgcattgaaaatggcatttctttgtcttccaaattctctttaattaaagttatggcacaaaaatatgagatcagccgatggcataatcagggactgcctcatggtcagtattca

SEQ ID NO: 219 - DNA, 204 bp, Homo sapiens
atgggggctgattttcaattttgtaagagaaattatgagcatagtttatatagtcttttatttgtaattgtttacgtgatttcagaagtaatatgcttaagttattctaatgtttttaaagctagagagtctgaaaagagggaagaagaaagaaaagtgtttaaattgatctcttttgaatttaaaatgcatattaagtataac

SEQ ID NO: 220 - DNA, 228 bp, Homo sapiens
atgcaagagtcaggatgtcgtttagaacatccttctgctaccaaattccgaaatcatgtcatggaaggagactgggataaggcagaaaatgacctgaatgaactaaagcctttagtgcattctcctcatgctattgtggtaagaggcgcacttgaaatctctcaaacgttgttgggaataattgtggtaaatacacttttgttcttagtttcacatttatgcttattt

SEQ ID NO: 221 - DNA, 243 bp, Homo sapiens
atggaaaacttgccaggaagttacttcattctttttctctttttcaaaagtgcatctcgtagtgccaacttggaactcacctgtttttctcggaaggaacgcttattttttgaccggacattctggctataccgcatcatcataaagttcttctgttttttcttctctttatttgtcgaactggaaaatggatttgttttggttttcttcctcacaaattcttttcggtctgtctttccagcc

SEQ ID NO: 222 - DNA, 255 bp, Homo sapiens
atgaagctcttgtggcaggtaactgtgcaccaccacacctggaatgccatcctgctcccgttcgtctacctcacggcgcaagtgtggattctgtgtgcagccatcgctgctgccgcctcagccgggccccagaactgcccctccgtctgctcgtgcagtaaccagttcagcaaggtggtgtgcacgcgccggggcctctccgaggtcccgcagggtattccctcgaacacccggtacctcaacctcatggagaac

SEQ ID NO: 223 - DNA, 255 bp, Homo sapiens
atgaagaggcagaacgtgcggactctgtccctcatcgtctgcaccttcacctacctgctggtgggcgccgccgtgttcgacgccctcgagtcggaccacgagatgcgcgaggaggagaaactcaaagccgaggagatccggatcaaggggaagtacaacatcagcagcgaggactaccggcagctggagctggtgatcctgcagtcggaaccgcaccgcgccggcgtccagtggaaattcgccggctccttctac

SEQ ID NO: 224 - DNA, 255 bp, Homo sapiens
atgacgccgagccccctgttgctgctcctgctgccgccgctgctgctgggggccttcccgccggccgccgccgcccgaggccccccaaagatggcggacaaggtggtcccacggcaggtggcccggctgggccgcactgtgcggctgcagtgcccagtggagggggacccgccgccgctgaccatgtggaccaaggatggccgcaccatccacagcggctggagccgcttccgcgtgctgccgcaggggctgaag

SEQ ID NO: 225 - DNA, 255 bp, Homo sapiens
ggcccgcgatgctcccagcccggtgagacctgcctgaatggcgggaagtgtgaagcggccaatggcacggaggcctgcgtctgtggcggggccttcgtgggcccgcgatgccaggaccccaacccgtgcctcagcaccccctgcaagaacgccgggacatgccacgtggtggaccgcagaggcgtggcagactatgcctgcagctgtgccctgggcttctctgggcccctctgcctgacacccctggacaacgcc

SEQ ID NO: 226 - DNA, 255 bp, Homo sapiens
atgctgctgtggtcattgctggtcatctttgattcgctgacccttgtggcgccctcttctgtcttcgaaggagacagcatcgttctgaaatgccagggagaacagaactggaaaattcagaagatggcttaccataaggataacaaagagttatctgttttcaaaaaattctcagatttccttatccaaagtgcagttttaagtgacagtggtaactatttctgtagtaccaaaggacaactctttctctgggat

SEQ ID NO: 227 - DNA, 174 bp, Homo sapiens
atgaaaacccaagacgatggagtattgcccccttatgatgtgaaccaactgcttggctgggacctgaatttgagtttattcctagggctctgtttgatgttacttctggctggctcatgtctgccctctcctgggatcacgggactatcccatggatccaacagagaagacagg

SEQ ID NO: 228 - DNA, 528 bp, Homo sapiens
atggcggcctctcaggtcctgggggagaagattaacatcctgtcgggagagactgtcaaagctggggacagggacccgctggggaacgactgtcccgagcaagataggctcccccagcgctcctggaggcagaagtgtgcctcctacgtgttggccctgaggccctggagcttcagtgcctcactcacaccggtggccctgggcagtgcccttgcctacagatcccacggtgtcctggatcccaggctcttggtgggttgtgccgtggctgtcctggctgtgcacggggccggtaatttggtcaacacttactatgacttttccaagggcattgaccacaaaaagagtgatgacaggacacttgtggaccgaatcttggagccgcaggatgtcgtccggttcggagtcttcctctacacgttgggctgcgtctgtgccgcttgcctctactacctgtcccctctgaaactggagcacttggctcttatctactttggaggcctgtctggctcctttctctacacagga

SEQ ID NO: 229 - DNA, 255 bp, Homo sapiens
atgaaaaagcgcaaagagctcaatgcattgattggtttggctggggacagccggagaaagaagcccaagaaaggcccaagcagtcaccgcctgcttcgcactgagcctcccgactcagactctgagtccagctccgaagaggaagaggaattcggtgtggttggaaatcgctctcgctttgccaagggagactatttacgatgctgcaagatctgttatccgctctgtggttttgtcatccttgctgcctgtgtt

SEQ ID NO: 230 - DNA, 741 bp, Homo sapiens
atggaaggcgactgtctgagctgcatgaagtatctgatgtttgtattcaatttcttcatatttctgggcgtggcctgcctgctggcatcgatctgggtcatggtggaccccaccggcttccgggagatcgtggctgccaatcctctgctcctcacgggcgcctacatcctcctggccatggggggcctgctctttctgctcggcttcctgggctgctgcggggccgtccgtgagaacaagtgtctgctgctatttttcttcctgttcatcctgatcatcttcctggcagagctctcagcagccatcctggccttcatcttcagggaaaatctcacccgagaattcttcaccaaggagctcaccaagcactaccagggcaataacgacacagacgtcttctctgccacctggaactcggtcatgatcacatttggttgctgcggggtcaacgggcctgaagactttaagtttgcatctgtgtttcgactcctgaccctggatagtgaagaggtgccggaggcctgctgccggagggaaccccaaagtcgggacggggtcctgctgagccgggaggagtgcctcctgggaaggagcctattcctaaacaagcagggctgttacacggtgatcctcaacaccttcgagacctacgtctacttggccggagcccttgccatcggggtactggccatcgagcttttcgccatgatctttgccatgtgcctcttccggggcatccag

SEQ ID NO: 231 - DNA, 255 bp, Homo sapiens
cgctatgcctgcggcggagactgcatcaggctctcgcgtctgcttctacgctttgcctgggagaggccctggtggcctcgttcctggcgcccggagtccctgctgcggccccacccccgggcggtcacggtgacccatgctgcccagcctggaggtaaaatcgttcgtggctgtggcttcagcatgtcgtcctcggtgaaaaccccagcactggaagagctggttcctggctccgaagagaagccgaaaggcagg

SEQ ID NO: 232 - DNA, 255 bp, Homo sapiens
atggaagatccgtcgggggctcgcgagccccgggcccggccgagagagcgggacccgggacggcgcccccacccagaccaaggccgcacccacgatcgaccgcgggaccgacccggggacccgcgcaggaagcgaagcagcgacgggaaccggcgaagggacggggaccgggacccggagagagaccaggagagggacgggaaccgcgaccggaaccgggaccgggagagggagagagagagggaaagagacccg

SEQ ID NO: 233 - DNA, 255 bp, Homo sapiens
atgttagccaacagctcctcaaccaacagttctgttctcccgtgtcctgactaccgacctacccaccgcctgcacttggtggtctacagcttggtgctggctgccgggctccccctcaacgcgctagccctctgggtcttcctgcgcgcgctgcgcgtgcactcggtggtgagcgtgtacatgtgtaacctggcggccagcgacctgctcttcaccctctcgctgcccgttcgtctctcctactacgcactgcac

SEQ ID NO: 234 - DNA, 255 bp, Homo sapiens
atgaagctgaagctgaagaacgtgtttctcgcctacttcctggtgtcgatcgccggcctcctctacgcgctggtacagctcggccagccatgtgactgccttcctcccctgcgggcagcagccgagcagctacggcagaaggatctgaggatttcccagctgcaagcggaactccgacggccaccccctgcccctgcccagccccctgaacccgaggccctgcctactatctatgttgttacccccacctatgcc

SEQ ID NO: 235 - DNA, 657 bp, Homo sapiens
atggcgctgtcctggctgcagcgcgtcgagcttgcgctctttgctgccgccttcctgtgcggggccgtggcggccgcggcgatgactcggacccagggctccttcagtggtagatgtcccctgtatggtgtggccaccctgaatggctcctccctggccttatcccgtccctcagcaccatccctgtgctactttgtagctggggcctctggcctcttggccctctactgcctcctgcttttgctcttctggatctacagcagctgcatcgaggactcccacagaggtgctatagggctgcgcattgcactggccatctcagctatagccgtcttcctggtcttggtgtctgcctgtatccttcgatttggcaccaggtctctctgcaactccatcatctccttgaacactacaattagctgttctgaagcccagaaaattccatggacaccccctggaactgctctgcagttttactccaacctacacaatgctgaaacctcttcttgggtgaatttggtattgtggtgtgtggtcttggtgctccaggtcgtgcagtggaagtctgaagccaccccataccggcctctggagaggggtgaccctgagtggagctctgagacagatgctctcgttgggtcacgcctttcccattcc

SEQ ID NO: 236 - DNA, 837 bp, Homo sapiens
tcaacagcagccactgccactgccactgctaatgccactgccactgccgctgccgctgcttccactgccactgtcaccactgccactgctactgctaccactgccactgccactgctaatgccactgccactgccgctgccgctgctacttccactgccactgtcaccactgccactgctactgctaccactgccactgccactgctaatgccactgccgctgccactgccactgccactcccactgccactgctactgccactgccactgctatgcagggccccatcaccattaccaccaccgccatcaccaccgtcatcaccatcaccaccatcgtcaccaccactgccatcaccaccgtcatcaccatcgccaccatcaccaccaccaccaccgccatcaccatcaccaccaccatcaccatcatcaccaccgtcaccaccaccaccatcacaaccatcaccaccatcatcaccatcaccaccaccaccattaccaccatcaccgtcaccaccaccaccaccatcaccaccgtcataaccaccaccaccaccaccatcaccaccaccaccaccgtcaccaccaccaccaccgtcaccaccaccatcgccatcaccaccatcaccatcactgtcaccaccaccaccaccgccataaccatcaccatcatcaccaccaccgccatcaccactgtcaccaccatcaccaccactaccgtcaccaccatcaccaccaccaccatcaccactgccatcaccatcaccaccaccgccatcaccaccaccaactgctcccttctgggggccaacagccctgcagggcaggcaggatcctca

SEQ ID NO: 237 - DNA, 255 bp, Homo sapiens
atgagtgaggcccgcagggacagcacgagcagcctgcagcgcaagaagccaccctggctaaagctggacattccctctgcggtgcccctgacggcagaagagcccagcttcctgcagcccctgaggcgacaggctttcctgaggagtgtgagtatgccagccgagacagcccacatctcttcaccccaccatgagctccggcggccggtgctgcaacgccagacgtccatcacacagaccatccgcagggggacc

SEQ ID NO: 238 - DNA, 309 bp, Homo sapiens
atgacggtgggagccaggctccgaagcaaggcggagagcagcctcctgcgccgcgggccccgagggcgagggcgaaccgagggggacgaggaggcggccgccatcctggagcacctggagtacgcggacgaggcggaggcggcggccgagagcgggacgagcgcggcggacgagcggggcccggggacccggggcgcgcggagggtgcacttcgccctcctgcccgagcgctacgagccactggaggagccggcgccgagcgagcagcccaggaagaggtaccggaggaagctgaagaagtacggcaag

SEQ ID NO: 239 - DNA, 186 bp, Homo sapiens
atggcgtccggagcggctcgctggctagtattggcacccgtcaggtccggggctctccggagcgggcctagcttgaggaaagatggcgatgtctccgccgcatggagcggctcaggccggagcctggtaccgtcgaggtcagtcatcgttacccgcagcggcgccattttgcccaaaccggtgaaa

SEQ ID NO: 240 - DNA, 255 bp, Homo sapiens
atgaaggtgttgggaagaagcttcttctgggtgctgtttcccgtccttccctgggcggtgcaggctgtggagcacgaggaggtggcgcagcgtgtgatcaaactgcaccgcgggcgaggggtggctgccatgcagagccggcagtgggtccgggacagctgcaggaagctctcagggcttctccgccagaagaatgcagttctgaacaaactgaaaactgcaattggagcagtggagaaagacgtgggcctgtcg

SEQ ID NO: 241 - DNA, 255 bp, Homo sapiens
atggggtgttggggtcggaaccggggccggctgctgtgcatgctggcgctgaccttcatgttcatggtgctggaggtggtggtgagccgggtgacctcgtcgctggcgatgctctccgactccttccacatgctgtcggacgtgctggcgctggtggtggcgctggtggccgagcgcttcgcccggcggacccacgccacccagaagaacacgttcggctggatccgagccgaggtaatgggggctctggtgaac

SEQ ID NO: 242 - DNA, 459 bp, Homo sapiens
atgaacgttggagttgcccacagtgaagtgaatccaaatacccgtgtcatgaacagccggggtatgtggctgacatatgcattgggagttggcttgcttcatattgtcttactcagcattcccttcttcagtgttcctgttgcttggactttaacaaatattatacataatctggggatgtacgtatttttgcatgcagtgaaaggaacacctttcgaaactcctgaccagggtaaagcaaggctcctaactcattgggaacaactggactatggagtacagtttacatcttcacggaagtttttcacaatttctccaataattctatattttctggcaagtttctatacgaagtatgatccaactcacttcatcctaaacacagcttctctcctgagtgtactaattcccaaaatgccacaactacatggtgttcggatctttggaattaataagtat

SEQ ID NO: 243 - DNA, 255 bp, Homo sapiens
atggtgccctccagcccagcggtggagaagcaggtgcccgtggaacctgggcctgaccccgagctccggtcctggcggcacctcgtgtgctacctttgcttctacggcttcatggcgcagatacggccaggggagagcttcatcaccccctacctcctggggcccgacaagaacttcacgcgggagcaggcatgtacgaacgagatcacgccggtgctgtcgtactcctacctggccgtgctggtgcccgtgttc

SEQ ID NO: 244 - DNA, 726 bp, Homo sapiens
aggcccacagaagcctgtgtcactctggcacaagctgccaccaccagccacctacacaaccctcagcacaccttgcacgggaccacagccccagctgtgctgctgagggccaagcacaaaggctccagtgaagaagcatctgtagggaatccagaaagagtgttcatgaaggtgttacaagcccagaagaagcacatgagcattgagctgactactgagccggaggcagcctcagacagcagtggcatcaacttgtcagtctttgggagtgatcagtttgaaattccgctaacccatcaactacagtccgtcatccccaacaacgatgtgagaagcttcatttctcatgttatctggaccttgaagacggactgctccgagacctatgtgcaagtgacctgtgccaagctcatctccaggacaggcctcctgatgaggcttctcagtgagcagcaggaagtaaaggcgtccaaggcagaatgggatacagaccagtggaaaactaagaactatattaatgaaagcacagaagcccagagtgaacagaaagagcagaagtcgagtgagctcacgaaagaagttccaggatatggctataacaacaaactaatcttggtgatatctgtgactgtaatactaacgattttgattctaattttttgtcttattgagatgcttcagtacatcctgaagatttacttcctgaaaatgaatgctctaggaccc

SEQ ID NO: 245 - DNA, 405 bp, Homo sapiens
gggcaggtgttggctctggtgctggtggccgctctgtggggtggcacgcagccgctgctgaagcgggcctccgccggcctgcagcgggttcatgagccgacctgggcccagcagttgctacaggagatgaagaccctcttcttgaatactgagtacctgatgccctttctcctcaaccagtgtggatcccttctctattacctcaccttggcatcgacagatctgaccctggctgtgcccatctgtaactctctggctatcatcttcacactgattgttgggaaggcccttggagaagatattggtggaaaacgagcagttgctggcatggtgctcaccgtgataggaatttcactctgcatcacaagctcagtgagtaagacccaggggcaacagtctaccctt

SEQ ID NO: 246 - DNA, 255 bp, Homo sapiens
ctgcaggtgatcaatgttgatgggacgaagaggcggaccctcctggaggacaagctcccgcacattttcgggttcacgctgctgggggacttcatctactggactgactggcagcgccgcagcatcgagcgggtgcacaaggtcaaggccagccgggacgtcatcattgaccagctgcccgacctgatggggctcaaagctgtgaatgtggccaaggtcgtcggacgctccccgaggaggtcgttgtctggcaca

SEQ ID NO: 247 - DNA, 255 bp, Homo sapiens
gtcgagactgcgcggccgttgggcgtgcagcggcgccagtcggcggacgaggggcccccgggagttgctggactgagacatgagcctccaactgtgtggttgggctcggtagcacatcgtgggacttgggtgtgcgcccacagatggtttggccctgcagtgaccagagcagcccaagccgccaccatggtgaaattgctagtggccaaaatcctgtgcatggtgggcgtgttcttcttcatgctgctcggctcc

SEQ ID NO: 248 - DNA, 255 bp, Homo sapiens
atggcagcccagggctatggctattatcgcactgtgatcttctcagccatgtttgggggctacagcctgtattacttcaatcgcaagaccttctcctttgtcatgccatcattggtggaagagatccctttggacaaggatgatttggggttcatcaccagcagccagtcggcagcttatgctatcagcaagtttgtcagtggggtgctgtctgaccagatgagtgctcgctggctcttctcttctgggctgctc

SEQ ID NO: 249 - DNA, 255 bp, Homo sapiens
atggcgccgccagccgcccgcctcgccctgctctccgccgcggcgctcacgctggcggcccggcccgcgcctagccccggcctcggccccggacccgagtgtttcacagccaatggtgcggattataggggaacacagaactggacagcactacaaggcgggaagccatgtctgttttggaacgagactttccagcatccatacaacactctgaaataccccaacggggaggggggcctgggtgagcacaactat

SEQ ID NO: 250 - DNA, 324 bp, Homo sapiens
ctgggacctgtccccaggggaattatttctaatacccttgataaaatgtacaaagctagggtaggaagtagcaaggtgacagcagtggttaggtggaaagtttctctaagagaaagaactaatgaattcgttcaattgaagctttttaaatatatttattcctgtcacctttcaagtcagcagctttttccaggtgacatggcaaaagggcctggcaagtgcacagggttaagccaaggactatcaatactgctccctaaaatattttcacctctggttttggggatctgcttcttctcggggtctctcctgctgctttcctgg

SEQ ID NO: 251 - DNA, 255 bp, Homo sapiens
gatatacccctgctccctggctccccacgccggctgagccctcaggcagggtccagagggggccagggccccaaacatggacagcagtgtctcaagatgccaggtccccgggccccaggtctgcagggcggttccaacagagatcctggccagccctgcggtggagagagcacccgcagcagctctgtcatcaacaactatctggatgccaatgagcctgtgtccttggaggcccgtcttagccgcatgcacttc

SEQ ID NO: 252 - DNA, 870 bp, Homo sapiens
attttgacagggaacaaagtgctaatgccatgtgatgccgttctgattgaaggcagctgtgtggtggatgaaggcatgctgacaggagaaagtattccagtcaccaaaactccgttacccaagatggatagctctgtgccctggaaaacacagagtgaagcggattacaagcggcatgtcctcttctgtggaacagaggttatccaggccaaggcagcttgctctgggaccgtgagagccgtggtactgcagactggattcaacactgcaaagggagaccttgtgagatccattctctaccctaagccagtgaattttcagttgtacagggatgccatcaggttcctcctgtgccttgtaggaacagccaccattgggatgatctatactctgtgtgtctatgtgcttagtggggaacctccagaggaggtggtgaggaaagcccttgacgtcatcacaattgcggttcctccggctctacctgctgctctgaccacaggcattatctatgcccagaggaggctgaagaagagaggcatcttctgcattagcccccagaggatcaacgtatgtggacagttaaaccttgtctgctttgacaagacaggcaccttaacaagggacggcttggacctctggggagtcgtgtcctgtgataggaatggctttcaggaagttcacagctttgcctcaggccaggctttgccatggggcccactgtgtgcagcgatggccagctgccactctctgatccttcttgatgggaccatccagggagaccctctggacctcaaaatgtttgaagccaccacctgggtaagcctctgctcttcagagaatctgagaagcttcttcaatgccagagcaaca

SEQ ID NO: 253 - DNA, 423 bp, Homo sapiens
atgtgggtcctaggcatcgcggcaactttttgcggattgttcttgcttccaggctttgcgctgcaaatccagtgctaccagtgtgaagaattccagctgaacaacgactgctcctcccccgagttcattgtgaattgcacggtgaacgttcaagacatgtgtcagaaagaagtgatggagcaaagtgccgggatcatgtaccgcaagtcctgtgcatcatcagcggcctgtctcatcgcctctgccgggtaccagtccttctgctccccagggaaactgaactcagtttgcatcagctgctgcaacacccctctttgtaacgggccaaggcccaagaaaaggggaagttctgcctcggccctcaggccagggctccgcaccaccatcctgttcctcaaattagccctcttctcggcacactgc

SEQ ID NO: 254 - DNA, 255 bp, Homo sapiens
atggccccgggtcgcgcggtggccgggctcctgttgctggcggccgccggcctcggaggagtggcggaggggccagggctagccttcagcgaggatgtgctgagcgtgttcggcgcgaatctgagcctgtcggcggcgcagctccagcacttgctggagcagatgggagccgcctcccgcgtgggcgtcccggagcctggccagctgcacttcaaccagtgtttaactgctgaagagatcttttcccttcatggc

SEQ ID NO: 255 - DNA, 255 bp, Homo sapiens
gcgctgagtgaccagaccatggagaccctgcttggtggcctgctagcgtttggcatggcgtttgccgtggtcgacgcctgccccaagtactgtgtctgccagaatctgtctgagtcactggggaccctgtgcccctccaaggggctgctctttgtaccccctgatattgaccggcggacagtggagctgcgcctgggcggcaacttcatcatccacatcagccgccaggactttgccaacatgacggggctggtg

SEQ ID NO: 256 - DNA, 285 bp, Homo sapiens
atggagttggtgctggtcttcctctgcagcctgctggcccccatggtcctggccagtgcagctgaaaaggagaaggaaatggacccttttcattatgattaccagaccctgaggattgggggactggtgttcgctgtggtcctcttctcggttgggatcctccttatcctaagtcgcaggtgcaagtgcagtttcaatcagaagccccgggccccaggagatgaggaagcccaggtggagaacctcatcaccgccaatgcaacagagccccagaaagcagagaac

SEQ ID NO: 257 - DNA, 255 bp, Homo sapiens
gcggctccgagaagcttccccctgcgacttccgcgaggagacgagtctgcgcagcgtggtggccgccgccccccgaccctctgcgcactctctcccgcgccggcggctcagcctagccccgttcggccggccgagactatggacacggaggatgaccccttgctgcaggatgtgtggctagaggaggagcaggaggaggaagaagcaacgggtgaaacctttttaggggcccagaagccagggccccaacctggg

SEQ ID NO: 258 - DNA, 255 bp, Homo sapiens
atggcgcggccggtccggggagggctcggggccccgcgccgctcgccttgccttctccttctctggctgcttttgcttcggctggagccggtgaccgccgcggccggcccgcgggcgccctgcgcggccgcctgcacttgcgctggggactcgctggactgcggtgggcgcgggctggctgcgttgcccggggacctgccctcctggacgcggagcctaaacctgagttacaacaaactctctgagattgaccct

SEQ ID NO: 259 - DNA, 255 bp, Homo sapiens
atgatgagaaaccacagaattgctagtagtttatgtggagatcaggtcttctccaagaaaaaaaaaaagaaaaaaaaaaacaacatggctgcaaaggagaaactggaggcagtgttaaatgtggccctgagggtgccaagcatcatgctgttggatgtcctgtacagatgggatgtcagctcctttttccagcagatccaaagaagtagccttagtaataaccctcttttccagtataagtatttggctcttaat

SEQ ID NO: 260 - DNA, 255 bp, Homo sapiens
atgtgcgcgcggatggccggtcgcacaacagcggcccctcgggggccctacggcccctggctctgcctcctggtggccctcgccctggacgtcgtgagagtggactgtggccaggctcccctggaccctaaggggctgcatgtgacagccgcccgcccagcccagcccacactctggactgccaagctggaccgcttcaagggctccaggcaccacaccaccctcatcacctgccaccgtgctgggctcacagag

SEQ ID NO: 261 - DNA, 255 bp, Homo sapiens
atgcccctgcatcagctgggggacaagccgctcaccttccccagccccaactcagccatggaaaacgggcttgaccacaccccacccagcaggagggcatccccgggcacacccctgagccccggctccctccgctccgctgcccatagccccctggacaccagcaagcagcccctctgccagctctgggccgagaagcatggcgcccgggggacccatgaggtgcggtacgtctcggccgggcagagcgtggcg

SEQ ID NO: 262 - DNA, 279 bp, Homo sapiens
atgaccgtgcagagactcgtggccgcggccgtgctggtggccctggtctcactcatcctcaacaacgtggcggccttcacctccaactgggtgtgccagacgctggaggatgggcgcaggcgcagcgtggggctgtggaggtcctgctggctggtggacaggacccggggagggccgagccctggggccagagccggccaggtggacgcacatgactgtgaggcgctgggctggggctccgaggcagccggcttccaggagtcccgaggcaccgtcaaa

SEQ ID NO: 263 - DNA, 255 bp, Homo sapiens
atggcggccgcggctccagggaacggccgcgcatcggcgccccggctgcttctgctctttctggttccgctgctgtgggccccggctgcggtccgggccggcccagatgaagaccttagccaccggaacaaagaaccgccggcgccggcccagcagctgcagccgcagcctgtggctgtgcagggccccgagccggcccgggtcgagaaaatatttacaccagcagctccagttcataccaataaagaagatcct

SEQ ID NO: 264 - DNA, 762 bp, Homo sapiens
atgccaatcaaacctgttgggtggatatgtgggcaggtgttgaagaacttttctggaagaatcgaggggatccagaaagcaatcatggaccttgtagatgagtttaaagatgaatttcccaccatcctaagattatcacagtctaatcagaaaagagaacctgcgcagaaaacatccaaaatcaggatggctattgctttagctaagattaatcgagcaacattaattcgtggattaaacagcatatccagatcctccaaatcagtggccaaacttctgcatcctcagcttgcatgcagacttttagagctaagggacatatctggtcgtctgctgagggaagttaatgcgccgaggcaacccctatataacattcaggtcagaaagggttctttgtttgaaatcatctcctttccagcaaagactgctttaactagcataatatatgcttcatatgcagcactaatttatttggcagtctgtgttaatgctgtgctgaagaaggtaaagaacatcttccaggaagaagaatccataaggcaaaacagagaggagagtgaaaattgtagaaaagccttttctgagcctgtgctttcggagcctatgtttgctgaaggtgaaatcaaagcaaaaccttataggtcattgccggagaagccagacatttcagattaccccaagcttcttgctaataagcagagtaataacatccaagttttacattctgtgtttgaccaatcagctgaaatgaatgagcaaatc

SEQ ID NO: 265 - DNA, 495 bp, Homo sapiens
atggcgctgctcgccttgctgctggtcgtggccctaccgcgggtgtggacagacgccaacctgactgcgagacaacgagatccagaggactcccagcgaacggacgagggtgacaatagagtgtggtgtcatgtttgtgagagagaaaacactttcgagtgccagaacccaaggaggtgcaaatggacagagccatactgcgttatagcggccgtgaaaatatttccacgttttttcatggttgcgaagcagtgctccgctggttgtgcagcgatggagagacccaagccagaggagaagcggtttctcctggaagagcccatgcccttcttttacctcaagtgttgtaaaattcgctactgcaatttagaggggccacctatcaactcatcagtgttcaaagaatatgctgggagcatgggtgagagctgtggtgggctgtggctggccatcctcctgctgctggcctccattgcagccggcctcagcctgtct

SEQ ID NO: 266 - DNA, 255 bp, Homo sapiens
atgtgcccaatgctactgaaaaacggttacaatggaaacgccaccccagtgaccaccactgccccgtgggcctccctgggcctctccgccaagacctgcaacaacgtgtccttcgaagagagcaggatagtcctggtcgtggtgtacagcgcggtgtgcacgctgggggtgccggccaactgcctgactgcgtggctggcgctgctgcaggtactgcagggcaacgtgctggccgtctacctgctctgcctggca

SEQ ID NO: 267 - DNA, 255 bp, Homo sapiens
atggagcttgggggtcactgggacatgaactcggccccgaggctggtctcggagaccgcagagcggaaacaggagcagaagacaggaaccgaggcggaggctgccgactccggtgccgtcggagcccgccgcttcctgctctgtctctacttggtgggcttcttggatttgtttggtgtcagcatggttgtgcctttattgagccttcatgtcaagtcccttggagcaagtccaacagttgctggaatagtaggc

SEQ ID NO: 268 - DNA, 255 bp, Homo sapiens
atggaggccaaggagaagcagcatctgttggacgccaggccggcaatccggtcatacacgggatctctgtggcaggaaggggctggctggattcctctgccccgacctggcctggacttgcaggccattgagctggctgcccagagcaaccatcactgccatgctcagaagggtcctgacagtcactgtgaccccaagaaggggaaggcccagcgccagctgtatgtagcctctgccatctgcctgttgttcatg

SEQ ID NO: 269 - DNA, 810 bp, Homo sapiens
gtgctggcggtggcgcgcggcgcacccgcgcttctgacctgcgtgaaccgcgggcacgtgtggaccgaccggcacgtggaggaggctcaacaggtggtgcactgggaccggcagccgcccggggtcccgcacgaccgcgcggaccgcctgctggacctctacgcgtcgggcgagcgccgcgcctacgggcccctttttctgcgcgaccgcgtggctgtgggcgcggatgcctttgagcgcggtgacttctcactgcgtatcgagccgctggaggtcgccgacgagggcacctactcctgccacctgcaccaccattactgtggcctgcacgaacgccgcgtcttccacctgacggtcgccgaaccccacgcggagccgcccccccggggctctccgggcaacggctccagccacagcggcgccccaggcccagaccccacactggcgcgcggccacaacgtcatcaatgtcatcgtccccgagagccgagcccacttcttccagcagctgggctacgtgctggccacgctgctgctcttcatcctgctactggtcactgtcctcctggccgcccgcaggcgccgcggaggctacgaatactcggaccagaagtcgggaaagtcaaaggggaaggatgttaacttggcggagttcgctgtggctgcaggggaccagatgctttacaggagtgaggacatccagctagattacaaaaacaacatcctgaaggagagggcggagctggcccacagccccctgcctgccaagtacatcgacctagacaaagggttccggaaggagaactgcaaa

SEQ ID NO: 270 - DNA, 255 bp, Homo sapiens
atgcagggggaggcacaccctagtgcttcccttattgacagaaccatcaagatgagaaaagaaacagaggctaggaaagtggtcttagcctggggactcctaaatgtatctatggctggaatgatatatactgaaatgactggaaaattgattagttcatactacaatgtgacatactggcccctctggtatattgagcttgcccttgcatctctcttcagccttaatgccttatttgatttttggagatatttc

SEQ ID NO: 271 - DNA, 255 bp, Homo sapiens
atgaagcacaagcgcgacgatgggcccgagaagcaggaggacgaggcggtggacgtgacgccggtgatgacctgcgtgtttgtggtgatgtgctgctccatgctggtgctgctctactatttctacgatctcctcgtgtacgtggtcatcgggatcttctgcctggcctccgccaccggcctctacagctgcctggcgccctgtgtgcggcggctgccttcggcaagtgcaggtgagtctgccctgctggccccg

SEQ ID NO: 272 - DNA, 255 bp, Homo sapiens
atgagcgccggaagggcgtcgggggccctgagccgcactaggacgcccctggagccggaaccccagcagaagccggaaccagaaccaaatcaccggtaccgggtcggccaggtggtcaggggcctcatgtcggaaccacagcctgacctggaaccgccccaacatgggctatatatgctcttcctgcttgtgctggtcttcttcctcatgggcctggtaggcttcatgatctgccacgtgctcaagaagaagggc

SEQ ID NO: 273 - DNA, 903 bp, Homo sapiens
atgctagccttgcgcgtggcgcgcggctcgtggggggccctgcgcggcgccgcttgggctccgggaacgcggccgagtaagcgacgcgcctgctgggccctgctgccgcccgtgccctgctgcttgggctgcctggccgaacgctggaggctgcgtccggccgctcttggcttgcggctgcccgggatcggccagcggaaccactgttcgggcgcggggaaggcggctcccaggccagcggccggagcgggcgccgctgccgaagccccgggcggccagtggggcccggcgagcacccccagcctgtatgaaaacccatggacaatcccgaatatgttgtcaatgacgagaattggcttggccccagttctgggctatttgattattgaagaagattttaatattgcactaggagtttttgctttagctggactaacagatttgttggatggatttattgctcgaaactgggccaatcaaagatcagctttgggaagtgctcttgatccacttgctgataaaatacttatcagtatcttatatgttagcttgacctatgcagatcttattccagttccacttacttacatgatcatttcgagagatgtaatgttgattgctgctgttttttatgtcagataccgaactcttccaacaccacgaacacttgccaagtatttcaatccttgctatgccactgctaggttaaaaccaacattcatcagcaaggtgaatacagcagtccagttaatcttggtggcagcttctttggcagctccagttttcaactatgctgacagcatttatcttcagatactatggtgttttacagctttcaccacagctgcatcagcttatagttactatcattatggccggaagactgttcaggtgataaaagac

SEQ ID NO: 274 - DNA, 255 bp, Homo sapiens
atggaatgcctgcgcagtttaccctgcctcctgccccgcgcgatgagacttccccggcggacgctgtgtgccctggccttggacgtgacctctgtgggtcctcccgttgctgcctgcggccgccgagccaacctgattggaaggagccgagcggcgcagctttgcgggcccgaccggctccgcgtggcaggtgaagtgcaccggtttagaacctctgacgtctctcaagccactttagccagtgtagccccagta

SEQ ID NO: 275 - DNA, 255 bp, Homo sapiens
atgcctgtgccctggttcttgctgtccttggcactgggccgaagcccagtggtcctttctctggagaggcttgtggggcctcaggacgctacccactgctctccgggcctctcctgccgcctctgggacagtgacatactctgcctgcctggggacatcgtgcctgctccgggccccgtgctggcgcctacgcacctgcagacagagctggtgctgaggtgccagaaggagaccgactgtgacctctgtctgcgt

SEQ ID NO: 276 - DNA, 255 bp, Homo sapiens
atggcgccggcgcccctaggcgtcccggaggagcagttgctggggtgtcgatctagagtgctttctcggttactcttcattgcccagaccgctctcctcctgttgcccgccgccggagcaggtctctgccccgcgccctgctcctgccgcattcctctcctggactgcagtcgcaggaaattgcccgcaccgagctggagggcgctgtcgggcttgctgccccccgacaccgctatcctggatttcagtcataat

SEQ ID NO: 277 - DNA, 255 bp, Homo sapiens
atggcgtggcgaggctgggcgcagagaggctggggctgcggccaggcgtggggtgcgtcggtgggcggccgcagctgcgaggagctcactgcggtcctaaccccgccgcagctcctcggacgcaggtttaacttctttattcaacaaaaatgcggattcagaaaagcacccaggaaggttgaacctcgaagatcagacccagggacaagtggtgaagcatacaagagaagtgctttgattcctcctgtggaagaa

SEQ ID NO: 278 - DNA, 582 bp, Homo sapiens
tctaggccggcagcgcctctcctccatggtcctgtctgtcagcgctgttttgggagcccgccggtgaggccgggccacgctcagacacttcgatcgtcgagtctgtcactgggcatggcgggtcagttccgcagctacgtgtgggacccgctgctgatcctgtcgcagatcgtcctcatgcagaccgtgtattacggctcgctgggcctgtggctggcgctggtggacgggctagtgcgaagcagcccctcgctggaccagatgttcgacgccgagatcctgggcttttccacccctccaggccggctctccatgatgtccttcatcctcaacgccctcacctgtgccctgggcttgctgtacttcatccggcgaggaaagcagtgtctggatttcactgtcactgtccatttctttcacctcctgggctgctggttctacagctcccgtttcccctcggcgctgacctggtggctggtccaagccgtgtgcattgcactcatggctgtcatcggggagtacctgtgcatgcggacggagctcaaggagatacccctcaactcagcccctaaatccaatgtc

SEQ ID NO: 279 - DNA, 255 bp, Homo sapiens
atggcccgagccatggccgccgcgtggccgctgctgctggtggcgctactggtgctgtcctggccacccccaggaaccggggacgtcgtcgtgcaggcgcccacccaggtgcccggcttcttgggcgactccgtgacgctgccctgctacctacaggtgcccaacatggaggtgacgcatgtgtcacagctgacttgggcgcggcatggtgaatctggcagcatggccgtcttccaccaaacgcagggccccagc

SEQ ID NO: 280 - DNA, 255 bp, Homo sapiens
atgggacaacccccggcggaggaggctgagcagcctggggccctggcccgagagttccttgctgccatggagcccgagcccgccccagccccggccccagaagagtggctggacattctggggaacgggctgttgaggaagaagacgctggtcccagggccgccaggttcgagccgcccggtcaagggccaggtggtcaccgtacatctgcagacgtcgctggagaatggcacacgggtgcaggaggagccggag

SEQ ID NO: 281 - DNA, 255 bp, Homo sapiens
atggagtcctcaggcaacccagagagcaccacctttttttactatgaccttcagagccagccgtgtgagaaccaggcctgggtctttgctaccctcgccaccactgtcctatactgcctggtgtttctcctcagcctagtgggcaacagcctggtcctgtgggtcctggtgaagtatgagagcctggagtccctcaccaacatcttcatcctcaacctgtgcctctcagacctggtgttcgcctgcttgttgcct

SEQ ID NO: 282 - DNA, 900 bp, Homo sapiens
atggacctgcccccgcagctctccttcggcctctatgtggccgcctttgcgctgggcttcccgctcaacgtcctggccatccgaggcgcgacggcccacgcccggctccgtctcacccctagcctggtctacgccctgaacctgggctgctccgacctgctgctgacagtctctctgcccctgaaggcggtggaggcgctagcctccggggcctggcctctgccggcctcgctgtgccccgtcttcgcggtggcccacttcttcccactctatgccggcgggggcttcctggccgccctgagtgcaggccgctacctgggagcagccttccccttgggctaccaagccttccggaggccgtgctattcctggggggtgtgcgcggccatctgggccctcgtcctgtgtcacctgggtctggtctttgggttggaggctccaggaggctggctggaccacagcaacacctccctgggcatcaacacaccggtcaacggctctccggtctgcctggaggcctgggacccggcctctgccggcccggcccgcttcagcctctctctcctgctcttttttctgcccttggccatcacagccttctgctacgtgggctgcctccgggcactggcccgctccggcctgacgcacaggcggaagctgcgggccgcctgggtggccggcggggccctcctcacgctgctgctctgcgtaggaccctacaacgcctccaacgtggccagcttcctgtaccccaatctaggaggctcctggcggaagctggggctcatcacgggtgcctggagtgtggtgcttaatccgctggtgaccggttacttgggaaggggtcctggcctgaagacagtgtgtgcggcaagaacgcaagggggcaagtcccagaag

SEQ ID NO: 283 - DNA, 255 bp, Homo sapiens
atggatacaggccccgaccagtcctacttctccggcaatcactggttcgtcttctcggtgtaccttctcactttcctggtggggctccccctcaacctgctggccctggtggtcttcgtgggcaagctgcagcgccgcccggtggccgtggacgtgctcctgctcaacctgaccgcctcggacctgctcctgctgctgttcctgcctttccgcatggtggaggcagccaatggcatgcactggcccctgcccttc

SEQ ID NO: 284 - DNA, 888 bp, Homo sapiens
atgagtgcctgcgggaggaaggccctgaccctgctgagcagtgtctttgctgtctgtggcttgggcctcctgggtatcgcggtcagcaccgactactggctgtacctggaggagggtgtgattgtgccccagaaccagagcaccgagatcaagatgtccctgcactcaggcctctggcgggtctgcttccttgcaggtgaggagcgggggcgttgcttcaccatagaatatgtgatgcccatgaacacccagctgacatccgagtccacggtcaatgttctaaagatgatccgctcagccacaccattccctctggtcagcctcttcttcatgttcattgggtttatcctgaacaacatcggacacatccgtccccaccggacgatactggcctttgtctctggcatcttctttatcctctcaggcctctctctcgtggtgggcctggtgctctacatctccagcatcaacgatgagatgctcaacaggaccaaggatgcagagacctacttcaactacaagtatgggtggtcgtttgccttcgccgccatctccttccttttaacggaggtaaagcccgtcaccctaagtatggataggctgggcctgggcactgccccactgagccggggagagtggggatgggggagaagggacattccacaaccattttggaccccggaccacccactctacttcccttcctcatcccagaatgtgtcactgtcttacctttctgggtctcctccggccaggatgtccccaggaccctgctcctgtccccacgtccacttcccaccccactcgagctgtgtcctgtgcagaccccagccaagggagatgaggcaggccccagcagcgagcccatcctctgctgtcttctccctg

SEQ ID NO: 285 - DNA, 891 bp, Homo sapiens
atggattgccaagaaaatgagtactgggaccaatggggacggtgtgtcacctgccaacggtgtggtcctggacaggagctatccaaggattgtggttatggagagggtggagatgcctactgcacagcctgccctcctcgcaggtacaaaagcagctggggccaccacagatgtcagagttgcatcacctgtgctgtcatcaatcgtgttcagaaggtcaactgcacagctacctctaatgctgtctgtggggactgtttgcccaggttctaccgaaagacacgcattggaggcctgcaggaccaagagtgcatcccgtgcacgaagcagacccccacctctgaggttcaatgtgccttccagttgagcttagtggaggcagatacacccacagtgccccctcaggaggccacacttgttgcactggtgagcagcctgctagtggtgtttaccctggccttcctggggctcttcttcctctactgcaagcagttcttcaacagacattgccagcgtggaggtttgctgcagtttgaggctgataaaacagcaaaggaggaatctctcttccccgtgccacccagcaaggagaccagtgctgagtcccaagtgagtgagaacatctttcagacccagccacttaaccctatcctcgaggacgactgcagctcgactagtggcttccccacacaggagtcctttaccatggcctcctgcacctcagagagccactcccactgggtccacagccccatcgaatgcacagagctggacctgcaaaagttttccagctctgcctcctatactggagctgagaccttggggggaaacacagtcgaaagcactggagacaggctggagctcaatgtgccctttgaagttcccagccct

SEQ ID NO: 286 - DNA, 255 bp, Homo sapiens
atggcagtcttattcctcctcctgttcctatgtggaactccccaggctgcagacaacatgcaggccatctatgtggccttgggggaggcagtagagctgccatgtccctcaccatctactctacatggggacgaacacctgtcatggttctgcagccctgcagcaggctccttcaccaccctggtagcccaagtccaagtgggcaggccagccccagaccctggaaaaccaggaagggaatccaggctcagactg

SEQ ID NO: 287 - DNA, 384 bp, Homo sapiens
atgggcacctccagcatcttcctctgcgtgctgttcctctgtggggcactgggtctcaccatgtcccctgcccggggaaggctccgctgctacatctgtggcttcaccaaaccctgccaccctgttcccaccgagtgtcgggacgatgaagcttgtggcatcagtattggcacttcagtgaaaaagctgcctctcaagggcccagtgccctctgccaggctatgccacctactggctgcactcctacactctgtggcaccactgctgcgagcaggacctgtgcaacatagccgcttccccacagcagctcaccagcctcctcgcctccctgcccctctttgtggccagcttcgctgggagaggacacctcctccactagcttcc

SEQ ID NO: 288 - DNA, 711 bp, Homo sapiens
atggctgtgtttctgcagctgctaccgctgctgctctcgagggcccaagggaaccctggggcttctctggacggccgccctggggaccgggtgaatctctcctgcggaggagtctctcatcccatccgctgggtctgggcacccagcttcccggcctgcaagggcctgtccaaaggacgccgaccgatcctgtgggcctcttcgagcgggacccccaccgtgcctcccctccagcctttcgtcggccgcctacgctccctggactctggtatccggcggctggagctcctcttgagcgcgggagactcgggcacttttttctgcaagggccgccacgaggacgagagccgtacagtgcttcacgtgctgggggacaggacctattgcaaggcccccgggcctacccatgggtccgtgtatccccagctcctgatcccgctgctgggcgctgggttggtgctcggactgggagctttgggcctggtctggtggctgcacaggcgcctgcccccgcaaccgattcgaccactccctagatttgctctgtcccccccacatagctccacttgtgaaaaccgagccccagaggccagtaaaggaggaagagcccaagattccaggggacctggaccaggaaccgagcctgctctatgcggatctggaccatctagccctcagcaggccccgccggctgtccacagcggaccctgc

SEQ ID NO: 289 - DNA, 255 bp, Homo sapiens
atggtcagctggggtcgtttcatctgcctggtcgtggtcaccatggcaaccttgtccctggcccggccctccttcagtttagttgaggataccacattagagccagaagagccaccaaccaaataccaaatctctcaaccagaagtgtacgtggctgcgccaggggagtcgctagaggtgcgctgcctgttgaaagatgccgccgtgatcagttggactaaggatggggtgcacttggggcccaacaataggaca

SEQ ID NO: 290 - DNA, 255 bp, Homo sapiens
tggcatctgtttggatggagtggcacaggtgtgtgtgagtgtggggagggcttcagcggcacagcctgcgagacctgcaccgagggcaagtacggcatccactgtgaccaagcatgttcttgtgtccatgggagatgcaaccaaggacccttgggagatggctcctgtgactgtgatgttggctggcgaggagtgcattgtgacaatgcaaccacagaagacaactgcaatgggacatgccataccagcgccaac

SEQ ID NO: 291 - DNA, 255 bp, Homo sapiens
atgcgggtgcggtggatgctcttttggctcctctttgggctcctactggaatttatcagccatcagtgcatctctgtgtctctcctgaagactatcttctggtctcgaaatggacatgatggatccacggatgtacagcagagagcctggaggtccaaccgccgtagacaggaagggctgaggtccatttgtatgcacacaaagaaaagagtttcttcctttcgaggaaataaaattggcctgaaagacgtcatt

SEQ ID NO: 292 - DNA, 255 bp, Homo sapiens
acgttcaccgtggaagatgcagtggagactatcggcttcgggcgtttccacattgccctctttctgatcatgggcagtactggggtggttgaggccatggagatcatgttgatagctgttgtgtctcctgtcatccgctgtgaatggcaactggagaattggcaggtggcattagtaaccacgatggtgttttttggctacatggttttcagtatcctctttggcctcctggctgacagatatggccgctggaag

SEQ ID NO: 293 - DNA, 255 bp, Homo sapiens
atgtcctttgaggagctttgctacaagaacccaaagatggccatacagaagatcagtgatgactacaaaatatactgtgagaaagcacctaaaataggcaagtattttaaaatggaaattatcaaggaaacaaagacagtttcacgctcaaataggaaaatgtccttgctcaaaagaactcttgtaaggaagccatcaatgagacccagaaacttgacagaagtcctcttaaatacacagcacttggagttcttc

SEQ ID NO: 294 - DNA, 897 bp, Homo sapiens
  misc_feature 521, 522: n = A,T,C or G
gttatcaatactctggctgaccatcatcattgtgggactggctttcgtggaagtccttggttacatttcattattgcgtttccgagaagttataaagttttcattatcctctggacagtttacctttggactatcttgtggtctcgaaatggacatgatggatccacggatgtacagcagagagcctggaggtccaaccgctgtagacagaaaggaaataaaattggcctgaaagacgtcattactctatggagacatgtggaaacaaaagttagagctaaaatccgtaagaggaaggtgacaacgaaaatcaaccatcatgacaaaatcaatggaaagaggaagaccgccaaaaaccagaaactaagcatgaaagaatgtgagcatgcagaaaaggagaggcaggtatcagaggcagaggaaaatgggaaattggatatgaaagaaatacacacctacaagaaaatgtttcaacgtgtgcaagagttgtggcggcgggcagaggactaccacaaacgcannagtaaggagcctcctctccgcagttgcaggatagttcaaatggtggcagcggagcatcgtcattcttcaggattgccctactggccctacctcacagctgaaactttaaaaaacaggatgggccgccagccacctcctccaactcaacaacattctataactgataactccctgagcctcaagacacctcccgaatgtctccttcgtccccttccaccctcagtggatgataatatcaaggagtgtcctcttgctcctcttccaccctctcctcttccaccctcagtggatgataatctcaaggagtgtctccttgcccctcttccaccctctcctcttccaccctcagtggatgataatctcaagactcctccc

SEQ ID NO: 295 - DNA, 255 bp, Homo sapiens
atggccacagccgccaccaccaccaccaccaccactgccacagtagccctgacgacgtcgtgggacaatgccactggacgccccacggtggagccagaccccatcctggacaactacgtgctgctggtggtggtgatgtcgctgttcgtggggggcacgctggtggtgttgtctggcgtcctgctcctctgcaagcgctgctgggacgtccaccagcgcctcaacagggccatggaggaagcggagaagaccacc

SEQ ID NO: 296 - DNA, 255 bp, Homo sapiens
gatctgtgcgtgggggatgtggtctgtctccgcaaggacaacatcgtcccagccgacatgctcttgctggccagcacggagcccagcagcctgtgctatgtggagacggtggacattgacggggagaccaacttgaagttcagacaggccctgatggtcacccacaaagaactggccactataaagaagatggcgtcctttcaaggcacagtgacgtgtgaggcgcctaacagtcggatgcaccacttcgtgggg

SEQ ID NO: 297 - DNA, 255 bp, Homo sapiens
atgaaatcatggaacaatacaataattttagaatttcttctcctgggaatttcagaggaaccagaattgcaggccttcctctttgggctgttcctgtccatgtacctggtcactgtgctcgggaacctgctcatcatcctggccacaatctcagactcccacctccacacccccatgtacttcttcctctccaacctgtccttcgtagacatctgttttgtctctaccactgtcccgaagatgctggtgaacatc

SEQ ID NO: 298 - DNA, 255 bp, Homo sapiens
gcaggacaggaagtacagacagagaacgtgacagtggctgagggtggggtggctgagatcacctgccgtctgcaccagtatgatgggtccatagttgtcatccagaacccagcccggcagaccctcttcttcaatggcacccgtgccttgaaggatgagcgtttccagcttgaggagttctccccacgccgggtgcggatccggctctcagatgcccgcctggaggacgaggggggctatttctgccagctctac

SEQ ID NO: 299 - DNA, 600 bp, Homo sapiens
atgaatgacatggtcctgactgtgatggcctatgaccagtttgtggccatttgtcaccccctacgctacccagtcatcatgaatccccatctctgtgtcttcttagttttggtgtcttttattcttagcctgttgaactcccagctgcacaatcagattgtgttacaattcacctgcttcaagaatgtggaaatctttaattttttctgtgagccatctcaacttctcaaccttgcctgttctgacagtgtcatcaataacatattcatgtatttagatagtgttatatttggttttcttcccatctcagggatccttttgtcttactataaaattgtctcctccattctaagaattccatcatcagatgggaagtataaagccttctccacatgtggctctcacctggcagttgtttgcttattttatggaacaggacttggagcctacctcagttcagctgcgtcctctttccccaggaagggtgcggtcacctcagtgatgtacactgtggtcatccctatgctgaaccccttcatctacagcctgagaaacagggacattaaaagtgccctgtggaggctgcacagcagaacagtc

SEQ ID NO: 300 - DNA, 255 bp, Homo sapiens
atgagcggacggcaaagaacgctttttcagacgtggggctcaagtatctcccgatcatctgggactccgggttgcagctccggaactgagcgacctcagagccctggcagctccaaggcgcctttgccagcagcagcggaggctcagctggagtcggacgatgatgtgttgcttgtcgcggcgtacgaggctgagcggcagttgtgtctagagaatggcgggttctgcacctccgcgggcgccctgtggatttac

SEQ ID NO: 301 - DNA, 255 bp, Homo sapiens
aaccttacagaattatcaaaatttctcctcctgggactctcagatgatcctgaactgcagcccgtcctctttgggctgttcctgtccatgtacctggtcacggtgctggggaacctgctcatcattctggccgtcagctctgactcccacctccacacccccatgtacttcttcctctccaacctgtcctttgttgacatctgtttcatctccaccacagtccccaagatgctagtgagcatccaggcacggagc

SEQ ID NO: 302 - DNA, 762 bp, Homo sapiens
atggcggcagtggcggcgactgcagcagcgaaggggaatgggggcggcggtggcagggccggggccggggacgccagcggcacgcggaagaagaagggcccggggcccctggccacggcgtacctggtcatctacaatgtggtgatgacagccgggtggctggttatagcggttggtctggtccgagcatacctggctaagggtagctaccatagcctttattattcaattgaaaagcctttgaaattctttcaaactggagccttattggagattttacattgtgctataggaattgttccatcttctgttgtcctgacttctttccaggtgatgtcaagagtttttctaatatgggcagtaacacatagcgtcaaagaggtacagagtgaagacagtgtcctcctgtttgttattgcatggacgatcacggaaatcatccgttactccttttatacattcagtctattaaaccatctgccttacctcatcaaatgggccaggtacacacttttcattgtgctgtacccaatgggagtgtcaggagaactgctcacaatatatgcagctctgccctttgtcagacaagctggcctatattccatcagtttacccaacaaatacaatttctcttttgactactatgcattcctgattctaataatgatctcctacattccaatttttccccagttatacttccacatgatacaccagagaagaaagatcctttctcatactgaagaacacaagaaatttgaa

SEQ ID NO: 303 - DNA, 255 bp, Homo sapiens
atgtcgctcatggtcgtcagcatggcgtgtgttgggttcttcttgctggaggggccctggccacatgtgggtggtcaggacaagcccttcctctctgcctggcccggcactgtggtgtctgaaggacaacatgtgactcttcagtgtcgctctcgtcttgggtttaacgaattcagtctgtccaaagaagacgggatgcctgtccctgagctctacaacagaatattccggaacagctttctcatgggccctgtg

SEQ ID NO: 304 - DNA, 255 bp, Homo sapiens
ctctttcaggacctggagaagaaaaaggagcggctggtggtggtggactgtgaatcagaacgcctcaatgctatcttgggccaggtagtgaaagcagcaagggctcaggcatgttctaacttctccctcctccccctctcacagggcttcatggacattgacttaaacaaattcaaggagagtggcgccaatgtgacaggtttccagctggtgaactacacagacactattccggccaagatcatgcagcagtgg

SEQ ID NO: 305 - DNA, 255 bp, Homo sapiens
atgcagctgcagttccggagctggatgctggccgcgctcacgctgctcgtggtcttcctcatcttcgcagacatctcagagatcgaagaagaaatcgggaattcgggaggcagaggtacaatcagatcagctgtgaacagcttacatagcaaatctaatagagctgaagttgtaataaacggctcctcatcaccagctgttgttgacagaagtaatgaaagcatcaagcacaacatccagccagcctcgtccaaa

SEQ ID NO: 306 - DNA, 255 bp, Homo sapiens
aaccaagagcctgaagacgacccaggagctttagctatggctgtcttcattattttgtccctgtttagtgttctggtgacaggcatgggtgaaggtggggctgggagtgagaaaggaggtgagagggaatgtaagctgaaccagcttccccattgcccctccgtatctcccagtgcccagccttggacacaccctggccagagccagctgtttgcagacctgagccgagaggagctgacggctgtgatgcgcttt

SEQ ID NO: 307 - DNA, 255 bp, Homo sapiens
caggtgcgagcccctatggttaatccaacattaggtgttcatgaagctgaccttttaaagacatcaggaacgctgattagttttatttacccagcccaaaatccagagttgctaaataaactttcccaaagaaaaactacagttctggcaatggaccaggttccaagagtcacaattgctcagggatatgatgcgctaagctccatggccaacattgcgggttataaggctgttgtcctagcagcaaatcatttt

SEQ ID NO: 308 - DNA, 255 bp, Homo sapiens
atgaccatcacttacacaagccaagtggctaatgcccgcttaggctccttctcccgcctgctgctgtgctggcggggcagcatctacaagctgctatatggcgagttcttaatcttcctgctctgctactacatcatccgctttatttataggctggccctcacggaagaacaacagctgatgtttgagaaactgactctgtattgcgacagctacatccagctcatccccatttccttcgtgctgggcttctac

SEQ ID NO: 309 - DNA, 255 bp, Homo sapiens
atgccttctgcatcctgtgatacactactggatgacatcgaagatatcgtgtctcaggaagattcaaaaccacaagataggcattttgtaagaaaggatgttgtcccgaaggtacgaaggcgaaatacccaaaaatatttgcaagaggaagaaaacagtccaccaagtgacagcactattccaggcatacagaaaatttggatacgaacatggggttgttctcataataattcagatggagaatatatggctgga

SEQ ID NO: 310 - DNA, 213 bp, Homo sapiens
atggtgtacccgctgggcccattgtgtccattgctctctcgcagccactggggatcgtgggtaagttctctttcagactttgaagctccacggctttgtgttctgagctatctgagtttgtttgagcagatttttttttttttttatctgaactgggtttggaagttgttacagaaactggactgggtccaggatcaaattaggtctgataat

SEQ ID NO: 311 - DNA, 864 bp, Homo sapiens
atggccgagaagcggcacacacgggactccgaagcccagcggctccccgactccttcaaggacagccccagtaagggccttggaccttgcggatggattttggtggcgttctcattcttattcaccgttataactttcccaatctcaatatggatgtgcataaagattataaaagagtatgaaagagccatcatctttagattgggtcgcattttacaaggaggagccaaaggacctggtttgttttttattctgccatgcactgacagcttcatcaaagtggacatgagaactatttcatttgatattcctcctcaggagatcctcacaaaggattcagtgacaattagcgtggatggtgtggtctattaccgcgttcagaatgcaaccctggctgtggcaaatatcaccaacgctgactcagcaacccgtcttttggcacaaactactctgaggaatgttctgggcaccaagaatctttctcagatcctctctgacagagaagaaattgcacacaacatgcagtctactctggatgatgccactgatgcctggggaataaaggtggagcgtgtggaaattaaggatgtgaaactacctgtgcagctccagagagctatggctgcagaagcagaagcgtcccgcgaggcccgcgccaaggttattgcagccgaaggagaaatgaatgcatccagggctctgaaagaagcctccatggtcatcactgaatctcctgcagcccttcagctccgatacctgcagacactgaccaccattgctgctgagaaaaactcaacaattgtcttccctctgcccatagatatgctgcaaggaatcataggggcaaaacacagccatctaggc

SEQ ID NO: 312 - DNA, 255 bp, Homo sapiens
agaaggaggaggaggcccgcgtcgcctccggcggggctcgcgctcgccccgcgctcgccctccgcctcgcccgagccccgggagggtgaaacgctttctcccagcatgcagcgggaggagggatttaacaccaagatggcggacggcccggatgagtacgataccgaagcgggctgtgtgccccttctccacccagaggaaatcaaaccccaaagccattataaccatggatatggtgaacctcttggacggaaa

SEQ ID NO: 313 - DNA, 255 bp, Homo sapiens
atgctgctgctgctgctgctgctgcccctgctctgggggacaaaggggatggagggagacagacaatatggggatggttacttgctgcaagtgcaggagctggtgacggtgcaggagggcctgtgtgtccatgtgccctgctccttctcctacccccaggatggctggactgactctgacccagttcatggctactggttccgggcaggagacagaccataccaagacgctccagtggccacaaacaacccagac

SEQ ID NO: 314 - DNA, 255 bp, Homo sapiens
atggctctcttcactccgtggaagttgtcctctcagaagctgggctttttcctggtgacttttggcttcatttggggtatgatgcttctgcactttaccatccagcagcgaactcagcctgaaagcagctccatgctgcgcgagcagatcctggacctcagcaaaaggtacatcaaggcactggcagaagaaaacaggaatgtggtggatgggccatacgctggagtcatgacagcttatgatctgaagaaaacc

SEQ ID NO: 315 - DNA, 255 bp, Homo sapiens
atgagctctaagtacccgcggtctgtccggcgctgcctgcccctctgcgccctaacactggaagcagctctcattctcctcttctatttttttacccactatgacgcttccttagaggatcaaaaggggctcgtggcatcctatcaaggtgcatctcttccactcacctgccacagcagcctctgctcagggtctgagactgggaaagcagtcggccaagatctgaccgtgatggcggcccttggcttgggcttc

SEQ ID NO: 316 - DNA, 255 bp, Homo sapiens
atgagctctaagtacccgcggtctgtccggcgctgcctgcccctctgggccctaacactggaagcagctctcattctcctcttctatttttttacccactatgacgcttccttagaggatcaaaaggggctcgtggcatcctatcaagttggccaagatctgaccgtgatggcggccattggcttgggcttcctcacctcgagtttccggagacacagctggagcagtgtggccttcaacctcttcatgctggcg

SEQ ID NO: 317 - DNA, 255 bp, Homo sapiens
gacatcccgccgctggccggcaagatcgcggcgctgtcgctgagcgccctcccggtgtcctacgcgctcaaccacgtctcggcgctctcgcaccccctgtgggtggcattgatgagcgccctaatcctgggtctgcttttcgtggcggtctacagcttgtcccatggcgaggtctcctatgacccactctatgctgtcttcgctgtcttcgccttcacctcggttgtggacctcatcatcgctcttcaggaagac

SEQ ID NO: 318 - DNA, 723 bp, Homo sapiens
atgacactccaatgggctgcagtggcaacctttctttatgccgaaataggactcattttaatcttctgcctaccttttattcctcctcagagatggcagaagattttttcatttaatgtctggggtaaaattgcaactttttggaacaaggctttccttaccattatcatcctattgattgttctatttctagatgctgtgagagaagtaaggaaatattcctcagttcataccattgagaagagctccaccagcagacctgatgcctatgaacacacacagatgaaactttttaggtctcaaagaaatctttacatttctggattttccctatttttttggctagttttgagacgtctggttacgcttattactcaactggcaaaagaactgtcaaacaaaggtgtacttaaaactcaagcagaaaatactaacaaggctgccaaaaaatttatggaagaaaacgaaaaactaaaaaggattttgaaaagccatggtaaagatgaagaatgtgttttggaagcagaaaataaaaaactagtagaagaccaggagaaactgaaaactgaattaaggaagacttcagatgccctttctaaggcacaaaatgatgtgatggaaatgaagatgcagtcagagagactttcgaaagaatatgatcaactcctgaaagaacactctgaacttcaggatcgtttagaaagaggcaacaagaaaagactg

SEQ ID NO: 319 - DNA, 456 bp, Homo sapiens
atgagcgtgtctgaagatggggggctcagggggcacgtttgcgtttggacctgtctgtgcgttctcctgcgtggcagtcctgatttccatgcttctggagaatccatttcgttaacactgaaagccagttctcttttcctggcagtttttttcattttatttttggcattttttacaagataccgttcgggaaaggcttttgaaaggacggaagcgtattcactgtgcgccagtactcctggctgtgctgtggtttctcccgacgtgcacatcgatctcgtatgtgtggcatctgatattaaacgggaggttttaagaagcgtctgccgtgatcatggagcttcggaagcgggaatggttcttccgggtttgctgttttgtctgtttcccccttgtgtggtttccgcctgcgacagttccagaatttgctctcccactcagtgtgctctgcagctg

SEQ ID NO: 320 - DNA, 255 bp, Homo sapiens
atggagcctggtgacgcggcgcgccctggctcgggtcgggctaccggggcgccgccgccgcggctgctgctgctgccgctgctgctgggttgggggctgcgagtcgcggccgcggcctcggcctcctcctctggggcggcggcggaggacagcagcgccatggaggagctcgctactgagaaggaggcggaggagagccaccggcaagacagcgtgagcctgctcaccttcatcctgctgctcacgctcaccatc

SEQ ID NO: 321 - DNA, 429 bp, Homo sapiens
atggacgggtccggggagcagcccagaggcggggggcccaccagctctgagcagatcatgaagacaggggcccttttgcttcaggggatgattgccgccgtggacacagactccccccgagaggtctttttccgagtggcagctgacatgttttctgacggcaacttcaactggggccgggttgtcgcccttttctactttgccagcaaactggtgctcaaggccctgtgcaccaaggtgccggaactgatcagaaccatcatgggctggacattggacttcctccgggagcggctgttgggctggatccaagaccagggtggttgggacggcctcctctcctactttgggacgcccacgtggcagaccgtgaccatctttgtggcgggagtgctcaccgcctcactcaccatctggaagaagatgggc

SEQ ID NO: 322 - DNA, 255 bp, Homo sapiens
atgggggccccagccgcctcgctcctgctcctgctcctgctgttcgcctgctgctgggcgcccggcggggccaacctctcccaggacggctactggcaggagcaggatttggagctgggaactctggctccactcgacgaggccatcagctccacagtctggagcagccctgacatgctggccagtcaagacagccagccctggacatctgatgaaacagtggtggctggtggcaccgtggtgctcaagtgccaa

SEQ ID NO: 323 - DNA, 255 bp, Homo sapiens
atggcctgtagaggaggagctgggaatggccaccgtgcctcagctacactctctcgggttagccctggaagtctttacacatgtagaacccgtacccataatatatgcatggtatctgactttttctacccaaatatgggaggcgtggaaagccacatttaccagctctctcagtgcctgattgaaagagggcataaggttataattgtcacccatgcttatggaaatcgaaaaggcatccgttacctcaccagt

SEQ ID NO: 324 - DNA, 255 bp, Homo sapiens
atgggaggattccagaggggcaaatatggaactatggctgaaggtagatcagaagataacttgtctgcaacaccaccggcattgaggattatcctagtgggcaaaacaggctgcgggaaaagtgccacagggaacagcatccttggccagcccgtgtttgagtccaagctgagggcccagtcagtgaccaggacgtgccaggtgaaaacaggaacatggaacgggaggaaagtcctggtggttgacacgccctcc

SEQ ID NO: 325 - DNA, 255 bp, Homo sapiens
atgccggctgagctgctgctgctgctgattgttgccttcgccagccccagctgccaggtgctctcatcactgcgcatggctgcaatcctggatgatcagacagtgtgtggccgcggtgagcgtctggccttggccttggcccgggagcagatcaacgggatcatcgaggtcccagccaaggcccgagtggaagtagacatctttgagctgcagcgggacagccagtacgagaccacggacaccatgtgtcagatc

SEQ ID NO: 326 - DNA, 255 bp, Homo sapiens
ctggggctgctgcggctggaccccagcgggggcgcgctgctgctatgcggcctcgtagcgctgctgggctggagctggctgcggaggcgccgggcgcggggcatcccgcccgggcccacgccctggcctctggtgggcaacttcggtcacgtgctgctgcctcccttcctccggcggcggagctggctgagcagcaggaccagggccgcagggattgatccctcggtcataggcccgcaggtgctcctggctcac

SEQ ID NO: 327 - DNA, 870 bp, Homo sapiens
ccaggcccacggaagcctgtgtcactctggcacaagctgccaccaccagccacctacacacccccccagcacacctcgcacgggaccacagccccagctgtgctgctaagggccaagcacaaaggctccactgaagaagcatctgtagggaatccagaaggagcattcatgaagatgttacaagcccggaagcagcacatgagcactgagctgactattgagtcggaggcgccctcagacagcagtggcatcaacttgtcaggctttgggagtgagcagctagacaccaatgacgagagtgatgttagcagcgcactaagttacatcttgccttatctctcactgagaaatctaggtgatcagcttgaaattcagctaaccgagcagctacggtccctcatccccaacgaggatgtgagaaagttcatgtctcatgttatctggaccttgaaaatggaatgttcagaaacacatgtgcaagggagctgtgccaagctcatgtcgcgaacaggcctcctgatgaagcttctcagcgagcagcaggaagcaaaggcattgaatgtagaatgggatacggaccaacaaaaaacaaattatattaatgagaacatggaacagaatgaacagaaagagcagaagtcaagtgagctcatgaaagaagttccaggatatgactataagaacaaactcatcttcgcaatatctgtgactgtcatactaataattttgattataattttttgttttatagaggcagaaaatgaaccattattaaaacaacacggcaaccggccgggaaaacccattcacagcgatttatatcgcgtcgccgcggctgccgaaaggaaatgggaggagaagctcgaggtt

SEQ ID NO: 328 - DNA, 756 bp, Homo sapiens
atgagagccccgctgctaccgccggcgccggtggtgctgtcgctcttgatactcggctcaggccattatgctgctggattggacctcaatgacacctactctgggaagcgtgaaccattttctggggaccacagtgctgatggatttgaggttacctcaagaagtgagatgtcttcagggagtgagatttcccctgtgagtgaaatgccttctagtagtgaaccgtcctcgggagccgactatgactactcagaagagtatgataacgaaccacaaatacctggctatattgtcgatgattcagtcagagttgaacaggtagttaagcccccccaaaacaagacggaaagtgaaaatacttcagataaacccaaaagaaagaaaaagggaggcaaaaatggaaaaaatagaagaaacagaaagaagaaaaatccatgtaatgcagaatttcaaaatttctgcattcacggagaatgcaaatatatagagcacctggaagcagtaacatgcaaatgtcagcaagaatatttcggtgaacggtgtggggaaaagtccatgaaaactcacagcatgattgacagtagtttatcaaaaattgcattagcagccatagctgcctttatgtctgctgtgatcctcacagctgttgctgttattacagtccagcttagaagacaatacgtcaggaaatatgaaggagaagctgaggaacgaaagaaacttcgacaagagaatggaaatgtacatgctatagca

SEQ ID NO: 329 - DNA, 255 bp, Homo sapiens
atgagcaacaatggagcagacctaacctttggttacatctcctgttttgtagctatccttttgtttggctcaaattttgtgccacttaaaaaatttgatactggtgatggaatgtttctccagtgggttctttgtgctgccatatggttggttgccttggttgtcaatctgatattacattgtccaaagttttggccttttgcaatgcttgggggctgcatttgggcaacagggaacattgctgttgtcccaatt

SEQ ID NO: 330 - DNA, 255 bp, Homo sapiens
atgcgcggctgcctgcggctcgcgctgctctgcgcgctgccctggctcctgctggcggcgtcgcccgggcacccggcgaaatcccccaggcagcccccggcaccgcgccgcgaccccttcgacgctgccaggggcgccgatttcgatcatgtctacagcggggtggtgaacctcagcaccgagaacatctactctttcaactacaccagccagcccgaccaggtgacagccgtgagggtgtatgtgaacagttcc

SEQ ID NO: 331 - DNA, 255 bp, Homo sapiens
atggggccctggggctggaaattgcgctggaccgtcgccttgctcctcgccgcggcggggactgcagtgggcgacagatgcgaaagaaacgagttccagtgccaagacgggaaatgcatctcctacaagtgggtctgcgatggcagcgctgagtgccaggatggctctgatgagtcccaggagacgtgcttgtctgtcacctgcaaatccggggacttcagctgtgggggccgtgtcaaccgctgcattcctcag

SEQ ID NO: 332 - DNA, 255 bp, Homo sapiens
atgccccgctacggagcgtcactccgccagagctgccccaggtccggccgggagcagggacaagacgggaccgccggagcccccggactcctttggatgggcctggcgctggcgctggcgctggcgctggcgctggcgctggctctgtctgactctcgggttctctgggctccggcagaggctcaccctctttctccccaaggccatcctgccaggttacatcgcatagtgccccggctccgagatgtctttggg

SEQ ID NO: 333 - DNA, 414 bp, Homo sapiens
atgttccttttgaagaagagttcagaaaaaggatggtatcctgtgaaggaaagccgtgacagaggcccaaggagatggagccaaggcctgtcaaggaagaaaaggacttttcccaccaagagttggagaaagaagacaccaggactacttcttcctcttcccagtgggtggcagcacggatctctaagagctggccaggtgctccacctggatggtgctggtggtgacagtgaggcagatgtccttatgatgctccgccgtcttatacggggtcaggtcaaaggaacactggggtggagggttgggattgctgtccccaccacccccaccctggggggctgccccaggagactggaagtgtggtggtggctgttgctgctgctgctgctgctgctgctgctgctgctgctgctg

SEQ ID NO: 334 - DNA, 255 bp, Homo sapiens
acttgccctccccttctggccttggtgatcactttttcaggaagagtgagactgaggacccccaagtgttccatccctaaggaaagcttgggaaaccaagccccttccatcctctcccaagcaccccagccaagccccagagagccagtccggaatgatcccactatggccaagctctggttcaaattccagcggtacttccgccggaaacctgtgcgcttctttaccttcctggcactctacctgactgctggg

SEQ ID NO: 335 - DNA, 255 bp, Homo sapiens
gagcagccaaaccaagtgaactatgggaatatctgcacgggcctagaagtgctgagcttcctgctaactgtcctccagtccccagccatcctcagtagcttcaaacctctgcagcgtggaattgccgcctgcatgacatgtggaaacaccaaggtgttgcgagccgtccacagccttctctcgcgcctgatgagcattttcccaacagagccgaaatacattgttttgaataatgtgttgctttcactctgtttt

SEQ ID NO: 336 - DNA, 735 bp, Homo sapiens
atgatctcggtcgtccacgaacgagtacctcctaaggaggtgcagcctccactaccggacacattttttgaccattttaaccgggtgcagtgggccttttctatttgtgaaattaatggcatgatccttgtaggactctggttaattcagtggctgctcttaaaatacaagtctattattagcagaagatttttctgcatagttggcacgctgtacctgtatcggtgtattacaatgtatgtaactacactcccagtacctggtatgcatttcaactgttctccgaagcttttcggagactgggaagcccaactgcgaagaataatgaagctcattgctggaggtggcttgtctatcactggctctcacaacatgtgtggggactatctgtacagcggccacacggtcatgctaacacttacctacttatttatcaaagagtattcccctcggcgactctggtggtatcactggatttgctggcttctcagcgtagttggaatcttctgtattctcttagcgcatgaccactacactgtggacgtggtggtggcatattacatcaccacgagactcttctggtggtatcacactatggccaatcagcaagtgctaaaggaagcttcccagatgaacctcctggccagggtgtggtggtacaggccatttcagtactttgaaaagaatgtccaaggaattgtacctcgatcttaccattggcctttcccctggcca

SEQ ID NO: 337 - DNA, 255 bp, Homo sapiens
ctggaatcaacacctttctcaggtgtagccaaccaaatccacactctgtgtgaaaggcccacatatggagaagtaaaggatggtgctttggatgtaaaaagacaacacaagtgcccaggccccacaagtggccccagcccaggaacgaatctctcaggctgcatcaggatgaatgatgacccaagtatggaagagaatggtgttgaacgcgtgtgtcctgagagcctgctgcagtccagggaatattcctcacta

SEQ ID NO: 338 - DNA, 216 bp, Homo sapiens
atgttgaataaccactgctattttaatgttttatttatttatttgtttgtaatttttgtagagacagggtttcaccatgttgtccaggctggtctcaaactcctgggctcaagcaatctgcccacctcggcctcccaaaatgctgggattacaggggtgagccactgtgtccggcaaaccattgctattttaaaactagactatttcttaaactcc

SEQ ID NO: 339 - DNA, 255 bp, Homo sapiens
atgaaacacctgtggttcttcctcctgctggtggcagctcccagatgggtcctgtcccaggtgcagctgcaggagtcgggcccaggactggtgaagccttcggagaccctgtccctcacctgcactgtctctggtggctccatcagtagttactactggagctggatccggcagcccgccgggaagggactggagtggattgggcgtatctataccagtgggagcaccaactacaacccctccctcaagagtcga

SEQ ID NO: 340 - DNA, 804 bp, Homo sapiens
acttggattctcacttgcatttatcttcagctgctcctatttaatcctctcgtcaaaactgaagggatctgcaggaatcgtgtgactaataatgtaaaagacgtcactaaattggtggcaaatcttccaaaagactacatgataaccctcaaatatgtccccgggatggatgttttgccaagtcattgttggataagcgagatggtagtacaattgtcagacagcttgactgatcttctggacaagttttcaaatatttctgaaggcttgagtaattattccatcatagacaaacttgtgaatatagtggatgaccttgtggagtgcgtgaaagaaaactcatctaaggatctaaaaaaatcattcaagagcccagaacccaggctctttactcctgaagaattctttagaatttttaatagatccattgatgccttcaaggactttgtagtggcatctgaaactagtgattgtgtggtttcttcaacattaagtcctgagaaagattccagagtcagtgtcacaaaaccatttatgttaccccctgttgcagccagctcccttaggaatgacagcagtagcagtaataggaaggccaaaaatccccctggagactccagcctacactgggcagccatggcattgccagcattgttttctcttataattggctttgcttttggagccttatactggaagaagagacagccaagtcttacaagggcagttgaaaatatacaaattaatgaagaggataatgagataagtatgttgcaagagaaagagagagagtttcaagaagtg

SEQ ID NO: 341 - DNA, 255 bp, Homo sapiens
atgattccggtgtcgctggtggtggtggtggtgggtggctggactgtcgtctacctgaccgacttggtgctgaagtcatctgtctattttaaacattcttatgaagactggctggaaaacaacggactgagcatctcccctttccacataagatggcaaactgctgttttcaatcgtgccttttacagttggggacggcggaaagcaaggatgctttaccaatggttcaattttggaatggtgtttggcgtaatt

SEQ ID NO: 342 - DNA, 255 bp, Homo sapiens
atggatgatttcatctccattagcctgctgtctctggctatgttggtgggatgttacgtggccggaatcattcccttggctgttaatttctcagaggaacgactgaagctggtgactgttttgggtgctggccttctctgtggaactgctctggcagtcatcgtgcctgaaggagtacatgccctttatgaagatattcttgagggaaaacaccaccaagcaagtgaaacacataatgtgattgcatcagacaaa

SEQ ID NO: 343 - DNA, 396 bp, Homo sapiens
atgactgcagcagcatccttgctggcctctctgcttcctgcattgcctcctctgaatcttcaggatgccaagtttgtggaggaacggagaaagcagctccagaattacctgcgcagcgtcatgaacaaagtcatccagatggtccccgagttcgctgccagccccaagaaggagaccctcatccagctgatgcccttcttcgtgatgggattacaggtcggaatgtacggattgtttcattttggggtaatgatggatcagccacagccaagccttacccgtgctgacgaatctccatgtgatcgtgtcctttctccatgtgctgcccacagaaagcagcgagactgctgtctcagctggaaagctgagcctgagagatttctggttaaaaaaaaa

SEQ ID NO: 344 - DNA, 255 bp, Homo sapiens
atgaggctgctgcggcgctgggcgttcgcggctctgctgctgtcgctgctccccacgcccggtcttgggacccaaggtcctgctggagctctgcgatgggggggcttaccccagctgggaggcccaggagcccctgaggtcacggaacccagccgtctggttagggagagctccgggggagaggtccgaaagcagcagctggacacaagggtccgccaggagccaccagggggcccgcctgtccatctggcccag

SEQ ID NO: 345 - DNA, 255 bp, Homo sapiens
atggcggagtcggccggagcctcctccttcttcccccttgttgtcctcctgctcgccggcagcggcgggtccgggccccggggggtccaggctctgctgtgtgcgtgcaccagctgcctccaggccaactacacgtgtgagacagatggggcctgcatggtttccattttcaatctggatgggatggagcaccatgtgcgcacctgcatccccaaagtggagctggtccctgccgggaagcccttctactgcctg

SEQ ID NO: 346 - DNA, 882 bp, Homo sapiens
atggtgtttctctcgggaaatgcttccgacagctccaactgcacccaaccgccggcaccggtgaacatttccaaggccattctgctcggggtgatcttggggggcctcattcttttcggggtgctgggtaacatcctagtgatcctctccgtagcctgtcaccgacacctgcactcagtcacgcactactacatcgtcaacctggcggtggccgacctcctgctcacctccacggtgctgcccttctccgccatcttcgaggtcctaggctactgggccttcggcagggtcttctgcaacatctgggcggcagtggatgtgctgtgctgcaccgcgtccatcatgggcctctgcatcatctccatcgaccgctacatcggcgtgagctacccgctgcgctacccaaccatcgtcacccagaggaggggtctcatggctctgctctgcgtctgggcactctccctggtcatatccattggacccctgttcggctggaggcagccggcccccgaggacgagaccatctgccagatcaacgaggagccgggctacgtgctcttctcagcgctgggctccttctacctgcctctggccatcatcctggtcatgtactgccgcgtctacgtggtggccaagagggagagccggggcctcaagtctggcctcaagaccgacaagtcggactcggagcaagtgacgctccgcatccatcggaaaaacgccccggcaggaggcagcgggatggccagcgccaagaccaagacgcacttctcagtgaggctcctcaagttctcccgggagaagaaagcggccaaaacgctgggcatcgtggtcggctgcttcgtcctctgctggctgccttttttcttagtcatgcccatt

SEQ ID NO: 347 - DNA, 255 bp, Homo sapiens
atgactttccgcgatctcctgagcgtcagtttcgagggaccccgcccggacagcagcgcagggggctccagcgcgggcggcggcgggggcagcgcgggcggcgcggccccctcggagggcccggcggtgggcggcgtgccggggggcgcgggcggcggcggcggcgtggtgggcgcaggcagcggcgaggacaaccggagctccgcgggggagccggggagcgcgggcgcgggcggcgacgtgaatggcacggcg

SEQ ID NO: 348 - DNA, 255 bp, Homo sapiens
atggctccgtggcctcacgagaacagctctcttgccccatggccggacctccccaccctggcgcccaataccgccaacaccagtgggctgccaggggttccgtgggaggcggccctagccggggccctgctggcgctggcggtgctggccaccgtgggaggcaacctgctggtcatcgtggccatcgcctggactccgagactccagaccatgaccaacgtgttcgtgacttcgctggccgcagccgacctggtg

SEQ ID NO: 349 - DNA, 255 bp, Homo sapiens
gcggccaccgggaccgcggccgccgcagccacgggcaggctcctgcttctgctgctggtgggctccacgcctgccttggcgctggccggctacatcgaggctcttgcagccaatgccggaacaggatttgctgttgctgagcctcaaatcgcaatgttttgtgggaagttaaatatgcatgtgaacattcagactgggaaatgggaacctgatccaacaggcaccaagagctgctttgaaacaaaagaagaagtt

SEQ ID NO: 350 - DNA, 576 bp, Homo sapiens
  misc_feature 576: n = A,T,C or G
atggcaagcaaggggccctcggcctctgcatctcctgagaactccagtgcaggggggcccagtgggagcagcaatggcgctggcgagagcggagggcaggacagcactttcgagtgcaacatctgcttggacacagccaaggatgccgtcatcagcctgtgtggccacctcttctgttggccgtgtttacatcagtggttggagaccagacctaacagacaggtgtgtcctgtttgcaaagctggcatcagccgagacaaggtcatccccctctatggaaggggcagcactgggcaacaggaccccagagagaagacccctcctcgtcctcaaggacagaggccagagccggagaatagagggggatttcaaggatttggatttggagatggtggcttccagatgtcttttggaattggggcatttccctttgggatatttgccacagcatttaatataaatgatgggcggcctcctccagctgtccctgggacaccccagtatgtggacgagcagttcctgtcacgcctcttcctatttgtggccctggtgatcatgttctggctcctgattgcn

SEQ ID NO: 351 - DNA, 255 bp, Homo sapiens
atgctagggtctttggggctttgggcattacttcccacagctgtggaagcacccccaaacaggcgaacctgtgtgttctttgaggcccctggagtgcggggaagcacaaagacactgggagagctgctagatacaggcacagagctccccagagctatccgctgcctctacagccgctgctgctttgggatctggaacctgacccaagaccgggcacaggtggaaatgcaaggatgccgagacagtgatgagcca

SEQ ID NO: 352 - DNA, 255 bp, Homo sapiens
atgcgtctctccgccggtcccgacgcggggccctcgggcaactccagcccatggtggcctctggccaccggcgctggcaacacaagccgggaggccgaagccctcggggagggcaacggcccaccgagggacgtgcgcaacgaggagctggccaaactggagatcgccgtgctggcggtgactttcgcggtggccgtgctgggcaacagcagcgtactgctggctctgcaccggacgccgcgcaagacgtcccgc

SEQ ID NO: 353 - DNA, 255 bp, Homo sapiens
atgctcatggcgtccaccacttccgctgtgcctgggcatccctctctgcccagcctgcccagcaacagcagccaggagaggccactggacacccgggacccgctgctagcccgggcggagctggcgctgctctccatagtctttgtggctgtggccctgagcaatggcctggtgctggcggccctagctcggcggggccggcggggccactgggcacccatacacgtcttcattggccacttgtgcctggccgac

SEQ ID NO: 354 - DNA, 255 bp, Homo sapiens
atggtgactgtgggcaactactgcgaggccgaagggcccgtgggtccggcctggatgcaggatggcctgagtccctgcttcttcttcacgctcgtgccctcgacgcggatggctctggggactctggccttggtgctggctcttccctgcagacgccgggagcggcccgctggtgctgattcgctgtcttggggggccggccctcgcatctctccctacgtgctgcagctgcttctggccacacttcaggcggcg

SEQ ID NO: 355 - DNA, 255 bp, Homo sapiens
atggccgcgcctgctgagccctgcgcggggcagggggtctggaaccagacagagcctgaacctgccgccaccagcctgctgagcctgtgcttcctgagaacagcaggggtctgggtaccccccatgtacctctgggtccttggtcccatctacctcctcttcatccaccaccatggccggggctacctgtggatgtccccactcttcaaagccaagatggtgcttggattcgccctcatagtcctgtgtacctcc

SEQ ID NO: 356 - DNA, 255 bp, Homo sapiens
atgggcgacatggccaatagttccatcgagttccaccccaagccccagcagcagcgggatgtcccccaggctggaggctttgggtgcacgctggcggagctgcgcaccctcatggagctgcgaggggccgaggcgctgcagaagatcgaggaggcctacggggatgtcagcgggctctgccggaggctgaagacctcacccacagagggcctggcggacaacaccaatgacctggagaagcgcaggcagatctac

SEQ ID NO: 357 - DNA, 489 bp, Homo sapiens
atggttgaccagttgcgggagcgcaccaccatggccgacccgctgcgggagcgcaccgagctgttgctggccgactacctggggtactgcgcccgggaacccggcacccccgagccggcgccatccacgcccgaggccgccgtgctgcgctccgcggccgccaggttacggcagattcaccggtcctttttctccgcctacctcggctaccccgggaaccgcttcgagctggtggcgctgatggcggattccgtgctctccgacagccccggccccacctggggcagagtggtgacgctcgtgaccttcgcagggacgctgctggagagagggccgctggtgaccgcccggtggaagaagtggggcttccagccgcggctaaaggagcaggagggcgacgtcgcccgggactgccagcgcctggtggccttgctgagctcgcggctcatggggcagcaccgcgcctggctgcaggctcagggcggctgg

SEQ ID NO: 358 - DNA, 255 bp, Homo sapiens
atgtggacttctggtagaatgagcaatgcaaagaactggcttggacttggcatgtccttgtacttctgggggctgatggaccttacgaccaccgttctctcggacaccccaacaccacaaggtgaattagaagcactcctgtcagacaagccacagtcacatcagcggaccaagaggagctgggtttggaaccagtttttcgttctggaagagtacactgggaccgaccctttgtatgtcggcaagcttcattca

SEQ ID NO: 359 - DNA, 255 bp, Homo sapiens
atggagaaaggactcactttgccccaggactgccgggactttgtgcacagcctgaagatgagaagcaaatacgcccttttcttggtttttgtggtgatagtttttgtcttcatcgaaaaggaaaataaaatcatatcaagggtctcagacaagctgaagcagattccccaagctctagcagatgccaacagcaccgacccagccctgatcttagctgagaacgcatctctcttgtccctgagcgagctcgattca

SEQ ID NO: 360 - DNA, 909 bp, Homo sapiens
atggcgaggcgcgggccagggtggcggccgcttctgctgctcgtgctgctggcgggcgcggcgcagggcggcctctacttccgccggggacagacctgctaccggcctctgcggggggacgggctggctccgctggggcgcagcacatacccccggcctcatgagtacctgtccccagcggatctgcccaagagctgggactggcgcaatgtggatggtgtcaactatgccagcatcacccggaaccagcacatcccccaatactgcggctcctgctgggcccacgccagcaccagcgctatggcggatcggatcaacatcaagaggaagggagcgtggccctccaccctcctgtccgtgcagaacgtcatcgactgcggtaacgctggctcctgtgaagggggtaatgacctgtccgtgtgggactacgcccaccagcacggcatccctgacgagacctgcaacaactaccaggccaaggaccaggagtgtgacaagtttaaccaatgtgggacatgcaatgaattcaaagagtgccacgccatccggaactacaccctctggagggtgggagactacggctccctctctgggagggagaagatgatggcagaaatctatgcaaatggtcccatcagctgtggaataatggcaacagaaagactggctaactacaccggaggcatctatgccgaataccaggacaccacatatataaaccatgtcgtttctgtggctgggtggggcatcagtgatgggactgagtactggattgtccggaattcatggggtgaaccatggggcgagagaggctggctgaggatcgtgaccagcacctataaggatgggaagggcgccagatacaaccttgccatcgaggagcactgtacatttggggaccccatcgtt

SEQ ID NO: 361 - DNA, 255 bp, Homo sapiens
gtagacttggcaccttattttacttctgagccgctctctgctgtccagaaacttggtggacctgtagtactgcattgttctgctcaacctgtgaccactcgtatctcatggctgcataacggaaaaacattggatggaaacctggaacatgttaagattcatcaggggactctgacaattctttctctcaactcctctcttttgggttactaccagtgccttgccaacaatagcatcggtgccattgtgagtggc

SEQ ID NO: 362 - DNA, 255 bp, Homo sapiens
gcaggtcaccctcgagtcctggctgattcttttcctggcagttccccttatgagggttacaactatggctcctttgagaatgtttctggatctaccgatggtctggttgacagcgctggcactggggacctctcttacggttaccaggggcacgaccagttcaagcggcgcctcccctctggccagatgcggcagctgtgcattgccatgggccgctcctttgaacctgtaggtactcggccccgagtggactcc

SEQ ID NO: 363 - DNA, 255 bp, Homo sapiens
atggccgcatctccgcacactctctcctcacgcctcctgacaggttgcgtaggaggctctgtctggtatcttgaaagaagaactatacaggactcccctcacaagttcttacatcttctcaggaatgtcaataagcagtggattacatttcagcactttagcttcctcaaacgcatgtatgtcacacagctgaacagaagccacaaccagcaagtaagacccaagccagaaccagtagcatctcctttccttgaa

SEQ ID NO: 364 - DNA, 255 bp, Homo sapiens
cgcctcctgtgcctgcaggcccttctccttctggggctgaaccccgtctctgcctccctccaggaccagcactgcgagagcctgtccctggccagcaacatctcaggactgcagtgcaacgcatccgtggacctcattggcacctgctggccccgcagccctgcggggcagctagtggttcggccctgccctgcctttttctatggtgtccgctacaataccacaaacaatggctaccgggagtgcctggccaat

SEQ ID NO: 365 - DNA, 255 bp, Homo sapiens
atggtgcccaaggcagacagcggcgccttcctgctgctcttcctgctcgtgctcactgtcaccgagccgctgcggccagagctgcggtgcaaccctgggcagtttgcgtgtcgcagcggcaccatccagtgcatccccctcccctggcagtgtgacggctgggcgacttgcgaggatgagagcgacgaagccaactgtccagaagtgaccggggaggtgcgtcctcatcatgggaaggaggctgtggatccgcgg

SEQ ID NO: 366 - DNA, 255 bp, Homo sapiens
atgagccccctttggtgggggtttctgctcagttgcttgggctgcaaaatcctgccaggagcccagggtcagttcccccgagtctgcatgacggtggacagcctagtgaacaaggagtgctgcccacgcctgggtgcagagtcggccaatgtctgtggctctcagcaaggccgggggcagtgcacagaggtgcgagccgacacaaggccctggagtggtccctacatcctacgaaaccaggatgaccgtgagctg

SEQ ID NO: 367 - DNA, 399 bp, Homo sapiens
atgggctacccggaggtggagcgcagggaactcctgcctgcagcagcgccgcgggagcgagggagccagggctgcgggtgtggcggggcccctgcccgggcgggcgaagggaacagctgcctgctcttcctgggtttctttggcctctcgctggccctccacctgctgacgttgtgctgctacctagagttgcgctcggagttgcggcgggaacgtggagccgagtcccgccttggcggctcgggcacccctggcacctctggcaccctaagcagcctcggtggcctcgaccctgacagccccatcaccagtcaccttgggcagccgtcacctaagcagcagccattggaaccgggagaagccgcactccactctgactcccaggacgggcaccaggtg

SEQ ID NO: 368 - DNA, 255 bp, Homo sapiens
atggccgggaaggtgcggtcactgctgccgccgctgctgctggccgccgcgggcctcgccggcctcctactgctgtgcgtccccacccgcgacgtccgggagccgcccgccctcaagtatggcatcgtcctggacgctggttcttcacacacgtccatgtttatctacaagtggccggcagacaaggagaacgacacaggcattgtgggccagcacagctcctgtgatgttccaggtgggggcatctccagctat

SEQ ID NO: 369 - DNA, 255 bp, Homo sapiens
atgggcagcttgtactcggagtacctgaaccccaacaaggtccaggaacactataattataccaaggagacgctggaaacgcaggagacgacctcccgccaggtggcctcggccttcatcgtcatcctctgttgcgccattgtggtggaaaaccttctggtgctcattgcggtggcccgaaacagcaagttccactcggcaatgtacctgtttctgggcaacctggccgcctccgatctactggcaggcgtggcc

SEQ ID NO: 370 - DNA, 255 bp, Homo sapiens
atgcggggcgtgtggccgcccccggtgtccgccctgctgtcggcgctggggatgtcgacgtacaagcgggccacgctggacgaggaggacctggtggactcgctctccgagggcgacgcataccccaacggcctgcaggtgaacttccacagcccccggagtggccagaggtgctgggctgcacggacccaggtggagaagcggctggtggtgttggtggtacttctggcggcaggactggtggcctgcttggca

SEQ ID NO: 371 - DNA, 255 bp, Homo sapiens
atgcaggctcgccatgcccatgtgccgcagctgcgctgggagaccatggatgtgcggaagctggacttccccagtgcttcttttgatgtggtgctcgagaagggcacgctggatgccctgctggctggggaacgagatccctggaccgtgtcctctgaaggtgtccacactgtggaccaggtgttgagtgaggtgggattccagaaggggacaagacagctgttaggctcacgcacgcagctggagctggtctta

SEQ ID NO: 372 - DNA, 345 bp, Homo sapiens
atggccctgggacagaaactgttcatcactatgtcccggggagcaggacgtctgcagggcacgctgtgggctctcgtcttcctaggcatcctagtgggcatggtggtgccctcgcctgcaggcacccgtgccaacaacacgctgctggactcgaggggctggggcaccctgctgtccaggtctcgcgccgggctagctggagagattgccggggtgaactgggaaagtggctatttggtggggatcaagcggcagcggaggctctactgcaacgtgggcatcggctttcacctccaggtgctccccgacggccggatcagcgggacccacgaggagaacccctac

SEQ ID NO: 373 - DNA, 255 bp, Homo sapiens
tctgagcttcatccaatttgcaacaaatctattttaaggcaagaagttgattatatgactcaggctaggggtcagagatcctctctggcagaagacaatgagtccagctacagcagaggatttgacatgacgtacactgagtttgactatgacttatgcaatgaagtggttgacgtgacctgctcccctaagccagatgcattcaacccatgtgaagatatcatggggtacaacatcctcagagtcctgatatgg

SEQ ID NO: 374 - DNA, 255 bp, Homo sapiens
atggatcccctgggcccagccaagccacagtggctgtggcgccgctgtctggccgggctgctgtttcagctgctggtggctgtgtgtttcttctcctacctgcgtgtgtcccgagacgatgccactggatcccctaggccagggcttatggcagtggaacctgtcaccggggctcccaatgggtcccgctgccaggacagcatggcgacccctgcccaccccaccctactgatcctgctgtggacgtggcctttt

SEQ ID NO: 375 - DNA, 255 bp, Homo sapiens
atgcggctcacccgctgccaggctgccctggcggccgccatcaccctcaaccttctggtcctcttctatgtctcgtggctgcagcaccagcctaggaattcccgggcccgggggccccgtcgtgcctctgctgccggcccccgtgtcaccgtcctggtgcgggagttcgaggcatttgacaacgcggtgcccgagctggtagactccttcctgcagcaagacccagcccagcccgtggtggtggcagccgacacg

SEQ ID NO: 376 - DNA, 255 bp, Homo sapiens
atgccattcccaaactgctcagcccccagcactgtggtggccacagctgtgggtgtcttgctggggctggagtgtgggctgggtctgctgggcaacgcggtggcgctgtggaccttcctgttccgggtcagggtgtggaagccgtacgctgtctacctgctcaacctggccctggctgacctgctgttggctgcgtgcctgcctttcctggccgccttctacctgagcctccaggcttggcatctgggccgtgtg

SEQ ID NO: 377 - DNA, 255 bp, Homo sapiens
atgtcggccaacgccacactgaagccactctgccccatcctggagcagatgagccgtctccagagccacagcaacaccagcatccgctacatcgaccacgcggccgtgctgctgcacgggctggcctcgctgctgggcctggtggagaatggagtcatcctcttcgtggtgggctgccgcatgcgccagaccgtggtcaccacctgggtgctgcacctggcgctgtccgacctgttggcctctgcttccctgccc

SEQ ID NO: 378 - DNA, 255 bp, Homo sapiens
atggcctgcaacagcacgtcccttgaggcttacacatacctgctgctgaacaccagcaacgcctcagactcggggtccacccagttgcccgcacccctcaggatctccttggccatagtgatgctgctgatgaccgtggtggggttcctgggcaacactgtggtctgcatcatcgtgtaccagaggccggctatgcgctcggccatcaacctgctgctggccaccctggccttctccgacatcatgctgtccctc

SEQ ID NO: 379 - DNA, 255 bp, Homo sapiens
atggggcccaccctagcggttcccaccccctatggctgtattggctgtaagctaccccagccagaatacccaccggctctaatcatctttatgttctgcgcgatggttatcaccatcgttgtagacctaatcggcaactccatggtcattttggctgtgacgaagaacaagaagctccggaattctggcaacatcttcgtggtcagtctctctgtggccgatatgctggtggccatctacccataccctttgatg

SEQ ID NO: 380 - DNA, 255 bp, Homo sapiens
atgtacaaggactgcatcgagtccactggagactattttcttctctgtgacgccgaggggccatggggcatcattctggagtccctggccatacttggcatcgtggtcacaattctgctactcttagcatttctcttcctcatgcgaaagatccaagactgcagccagtggaatgtcctccccacccagctcctcttcctcctgagtgtcctggggctcttcggactcgcttttgccttcatcatcgagctcaat

SEQ ID NO: 381 - DNA, 255 bp, Homo sapiens
atggctgatgcccagaacatttcactggacagcccagggagtgtgggggccgtggcagtgcctgtggtctttgccctaatcttcctgctgggcacagtgggcaatgggctggtgctggcagtgctcctgcagcctggcccgagtgcctggcaggagcctggcagcaccacggacctgttcatcctcaacctggcggtggctgacctctgcttcatcctgtgctgcgtgcccttccaggccaccatctacacgctg

SEQ ID NO: 382 - DNA, 255 bp, Homo sapiens
atgactacctctccgatcctgcagctgctgctgcggctctcactgtgcgggctgctgctccagagggcggagacaggctctaaggggcagacggcgggggagctgtaccagcgctgggaacggtaccgcagggagtgccaggagaccttggcagccgcggaaccgccttcaggcctcgcctgtaacgggtccttcgatatgtacgtctgctgggactatgctgcacccaatgccactgcccgtgcgtcctgcccc

SEQ ID NO: 383 - DNA, 255 bp, Homo sapiens
atggccggcgcccccggcccgctgcgccttgcgctgctgctgctcgggatggtgggcagggccggcccccgcccccagggtgccactgtgtccctctgggagacggtgcagaaatggcgagaataccgacgccagtgccagcgctccctgactgaggatccacctcctgccacagacttgttctgcaaccggaccttcgatgaatacgcctgctggccagatggggagccaggctcgttcgtgaatgtcagctgc

SEQ ID NO: 384 - DNA, 255 bp, Homo sapiens
atggccaggcagaagaaaatggggcaaagcgtgctccgggcggtcttctttttagtcctggggcttttgggtcattctcacggaggattccccaacaccatcagcataggtggacttttcatgagaaacacagtgcaggagcacagcgctttccgctttgccgtgcagttatacaacaccaaccagaacaccaccgagaagcccttccatttgaattaccacgtagatcacttggattcctccaatagtttttcc

SEQ ID NO: 385 - DNA, 255 bp, Homo sapiens
atggcatttcaaaaggcagtgaaagggacgattcttgttggaggaggtgctcttgcaactgttttaggactttctcagtttgctcattacagaaggaaacaaatgaacctggcctatgttaaagcagcagactgcatttcagaaccagttaacagggagcctccttccagagaagctcagctactgactttgcaaaacacatctgaatttgatatccttgttattggaggaggagcaacaggaagtggctgtgcg

SEQ ID NO: 386 - DNA, 255 bp, Homo sapiens
atgaaccggcagctagtgaacattttgacagccttgtttgcatttttcttagagacaaaccacttcaggacggctttctgcaaagaccatgactccaggtctggaaaacaaccttcacagaccctatctccttcagatttcttggacaagttaatgggaaggacatcaggatatgatgcaagaatcaggccaaattttaaagggcctcctgtaaatgttacctgcaacatatttatcaacagctttgggtcaata

SEQ ID NO: 387 - DNA, 255 bp, Homo sapiens
atgctgagggggactctactgtgcgcggtgctcgggcttctgcgcgcccagcccttcccctgtccgccagcttgcaagtgtgtcttccgggacgccgcgcagtgctcggggggcgacgtggcgcgcatctccgcgctaggcctgcccaccaacctcacgcacatcctgctcttcggaatgggccgcggcgtcctgcagagccagagcttcagcggcatgaccgtcctgcagcgcctcatgatctccgacagccac

SEQ ID NO: 388 - DNA, 255 bp, Homo sapiens
cggcggcgcgccggcggcaggaccatggttgagcgcgccagcaagttcgtgctggtggtggcgggctcggtgtgcttcatgctcatcttgtaccagtacgcgggcccaggactgagcctgggcgcgcccggcggccgcgcgccgcccgacgacctggacctgttccccacacccgacccccactacgagaagaagtactacttcccggtccgcgagctggagcgctcgctgcgcttcgacatgaagggcgacgac

SEQ ID NO: 389 - DNA, 255 bp, Homo sapiens
atgagcctccccaattcctcctgcctcttagaagacaagatgtgtgagggcaacaagaccactatggccagcccccagctgatgcccctggtggtggtcctgagcactatctgcttggtcacagtagggctcaacctgctggtgctgtatgccgtacggagtgagcggaagctccacactgtggggaacctgtacatcgtcagcctctcggtggcggacttgatcgtgggtgccgtcgtcatgcctatgaacatc

SEQ ID NO: 390 - DNA, 255 bp, Homo sapiens
atggacggatcccacagcgcagccctgaagctgcagcagctgcctcccacaagtagctccagcgccgtaagcgaggcctccttctcctacaaggcaagggcttttttggggaacctgattggcgccctcttggcgatcttcgggcacctcgtggtcagcattgcacttaacctccagaagtactgccacatccgcctggcaggctccaaggatccccgggcctatttcaagaccaagacatggtggctgggcctg

SEQ ID NO: 391 - DNA, 255 bp, Homo sapiens
atggggaaaccggcgaggaaaggatgcgagtggaagcgcttcctgaagaataactgggtgttgctgtccaccgtggccgcggtggtgctaggcattaccacaggagtcttggttcgagaacacagcaacctctcaactctagagaaattctactttgcttttcctggagaaattctaatgcggatgctgaaactcatcattttgccattaattatatccagcatgattacaggtgttgctgcactggattccaac

SEQ ID NO: 392 - DNA, 255 bp, Homo sapiens
gaacgagtggaatatctctttctcataatttttacggtggaagcgtttttaaaagtaatcgcctatggactcctctttcaccccaatgcctacctccgcaacggctggaacctactagattttataattgtggttgtggggctttttagtgcaattttagaacaagcaaccaaagcagatggggcaaacgctctcggagggaaaggggccggatttgatgtgaaggcgctgagggccttccgcgtgctgcgcccc

SEQ ID NO: 393 - DNA, 888 bp, Homo sapiens
atgcatgtcttcattgatgaacatggggaaattagatcctgttatttaaaatctggaaatcagaaagaaggccctttacagcctctaccatcaaataatgactgtctctctcaggctcgagagatgcaggtcagctcctccagtaccacaacttctgagagtcaagatccgtcttctggggaccctgccgtcagtgcccttcagcaacagctgttactgatggtggctcgcaggacccagtcggaaaccccacggcatgtgagtcaggatctggaagcctcgtcatgttcttcaacacaaggaaaatttaaccgagagcagttttacaaatttatcattttccctggcaagtggattaaagtctggtatgatcgactgaccttgctggcattacttgatcgaactgaagacatcaaggagaatgtactggcgattttactcattgtcctggtttccctccttggatttctgaccttgagccaaggcttttgcaaagatatgtgggtgctcctcttctgcctcgtcatggccagctgccagtactccctgctaaaggcaagaccacatctaattcttaccagtagcgttgttcagcctgaccccgcctcaccaatacacggacacaaccaaatcataacatatagcagaccaatctatttttgtgtgctgtgtggccttattttgcttcttgatacaggggccaaagccaggcaccctcccagttacgttgtgtatggcctgaagctcttctctccagtgtttctacaatcagctagggactacttaatagggaaaattatgaacagccacaaagacttttttacttctgaaaaaaaaaaggacaaaataatttcagcaatttcaagtgtcattttcctgaagtcctgg

SEQ ID NO: 394 - DNA, 255 bp, Homo sapiens
atgcatgtgtgcctgtgtgtgtgggtgcacatttgtgtgtgtgtgcctgtgtgtgtgggtgcacatttgtgtgtgtgggtgcacatttgtgtgtgtgtgcgcctgtgtgggtgcacatttgtgtgtgtgtgtgcctgtgtgtgtgcctgtgtgtgtgggtgcctgtgtgtgtggggcacatttgtgtgtgtgtgtgcctgtgtgtgggtgcacatttgtgtgtgtgcctctgtgtgtgtgcctgtgtgtgggggt

SEQ ID NO: 395 - DNA, 483 bp, Homo sapiens
atggcagtcatcctgggcatctttggcaccgtgcagtaccgctcccggtacctcatcctgtatgcagcctggctggtgctctgggttggctggaatgcatttatcatctgcttctacttggaggttggacagctgtcccaggaccgggacttcatcatgaccttcaacacatccctgcaccgctcctggtggatggagaatgggccaggctgcctggtgacacctgttctgaactcccgcctggctctggaggaccaccatgtcatctctgtcactggctgcctgcttgactacccctacattgaagccctcagcagcgccctgcagatcttcctggcactgttcggcttcgtgttcgcctgctacgtgagcaaagtgttcctggaggaggaggacagctttgacttcatcggcggctttgactcctacggataccaggcgccccagaagacgtcgcatttacagctgcagcctctgtacacg

SEQ ID NO: 396 - DNA, 255 bp, Homo sapiens
atgcgccctgacagcccaacaatggcggcgcccgcggagtcgctgaggaggcggaagactgggtactcggatccggagcctgagtcgccgcccgcgccggggcgtggccccgcaggctctccggcccatctccacacgggcaccttctggctgacccggatcgtgctcctgaaggccctagccttcgtgtacttcgtggcattcctggtggctttccatcagaacaagcagctcatcggtgacagggggctgctt

SEQ ID NO: 397 - DNA, 255 bp, Homo sapiens
atgaatccctgcggttggctgggggcagtgggtcccacactgcctcacttccctaaatgggcagcttcacttttagaaccccgggtccttccctggcaggcccaggtggcacatcctgtgtcgggtgggccctcaccttggatctccaggcctgacactgcccagctggatggaaccatggccccagccttcctgctgctgctgctgctgtggccacagggttgcgtctcaggcccctctgctgacagtgtatac

SEQ ID NO: 398 - DNA, 255 bp, Homo sapiens
atgactgaatatgagctgctcatccaaatttctgattcagtgcactacacagagggagcacttgtagtccgtgtgctggatgtcaatgataatccaccagtgttttctcaagatttctatcaggtcacagttcctgaatcaatacctgtggggtattcagtgctgactctgtcagccacagacttagaaagcaatgagaacatttcttacagaattctatcctcttctaaggaattctccattgatcctaagaat

SEQ ID NO: 399 - DNA, 255 bp, Homo sapiens
atgcgttccgggggccgcgggcgaccccgcctgcggctgggggaacgtggcctcatggagccactcttgccgccgaagcgccgcctgctaccgcgggttcggctcttgcctctgttgctggcgctggccgtgggctcggcgttctacaccatttggagcggctggcaccgcaggactgaggagctgccgctgggccgggagctgcgggtcccattgatcggaagcctccccgaagcccggctgcggagggtggtg

SEQ ID NO: 400 - DNA, 255 bp, Homo sapiens
atgcatctcctcggcccctggctcctgctcctggttctagaatacttggctttctctgactcaagtaaatgggtttttgagcaccctgaaaccctctacgcctgggagggggcctgcgtctggatcccctgcacctacagagccctagatggtgacctggaaagcttcatcctgttccacaatcctgagtataacaagaacacctcgaagtttgatgggacaagactctatgaaagcacaaaggatgggaaggtt

SEQ ID NO: 401 - DNA, 597 bp, Homo sapiens
atgacccggctgctgggctacgtggaccccctggatcccagctttgtggctgccgtcatcaccatcaccttcaatccgctctactggaatgtggttgcacgatgggaacacaagacccgcaagctgagcagggccttcggatccccctacctggcctgctactctctaagcgtcaccatcctgctcctgaacttcctgcgctcgcactgcttcacgcaggccatgctgagccagcccaggatggagagcctggacacccccgcggcctacagcctgggcctcgcgctcctgggactgggcgtcgtgctcgtgctctccagcttctttgcactggggttcgctggaactttcctaggtgattacttcgggatcctcaaggaggcgagagtgaccgtgttccccttcaacatcctggacaaccccatgtactggggaagcacagccaactacctgggctgggccatcatgcacgccagccccacgggcctgctcctgacggtgctggtggccctcacctacatagtggctctcctatacgaagagcccttcaccgctgagatctaccggcagaaagcctccgggtcccacaagaggagc

SEQ ID NO: 402 - DNA, 255 bp, Homo sapiens
atggggaagaaagtggccatcattggagctggtgtgagtggcttggcctccatcaggagctgtctggaagaggggctggagcccacctgctttgagaagagcaatgacattgggggcctgtggaaattttcagaccatgcagaggagggcagggctagcatttacaaatcagtcttttccaactcttccaaagagatgatgtgtttcccagacttcccatttcccgatgacttccccaactttatgcacaacagc

SEQ ID NO: 403 - DNA, 732 bp, Homo sapiens
atgcagcctccgggcccgcccccggcctatgcccccactaacggggacttcacctttgtctcctcagcagacgcggaagatctcagtggttcaatagcatccccagatgtcaaattaaatcttggtggagattttatcaaagaatctacagctactacatttctgagacaaagaggttatggctggcttctggaagttgaagatgatgatcctgaagataacaagccactcttggaagaattggacattgatctaaaggatatttactacaaaatccgatgtgttttgatgccaatgccatcacttggttttaatagacaagtggtgagagacaatcctgacttttggggtcctctggctgttgttcttttcttttccatgatatcattatatggacagtttagggtggtctcatggattataaccatttggatatttggttcactaacaattttcttactggccagagttcttggtggagaagttgcatatggccaagtccttggagttataggatattcattacttcctctcattgtaatagcccctgtacttttggtggttggatcatttgaagtggtgtctacacttataaaactgtttggtgtgttttgggctgcctacagtgctgcttcattgttagtgggtgaagaattcaagaccaaaaagcctcttctgatttatccaatctttttattatacatttattttttgtcgttatatactggtgtg

SEQ ID NO: 404 - DNA, 318 bp, Homo sapiens
atggcgactcccggccctgtgattccggaggtcccctttgaaccatcgaagcctccagtcattgaggggctgagccccactgtttacaggaatccagagagtttcaaggaaaagttcgttcgcaagacccgcgagaacccggtggtacccataggttgcctggccacggcggccgccctcacctacggcctctactccttccaccggggcaacagccagcgctctcagctcatgatgcgcacccggatcgccgcccagggtttcacggtcgcagccatcttgctgggtctggctgtcactgctatgaagtctcgaccc

SEQ ID NO: 405 - DNA, 810 bp, Homo sapiens
aagatgaagatccctttcctcctactgttctttctgtgggaagccgagagccacgcagcatcaaggccgaacatcatcctggtgatggctgacgacctcggcattggagatcctgggtgctatgggaacaaaactatcaggactcccaatatcgaccggttggccagtgggggagtgaaactcactcagcacctggcagcatcaccgctgtgcacaccaagcagggcagccttcatgactggccggtaccctgtccgatcaggaatggcatcttggtcccgcactggagttttcctcttcacagcctcttcgggaggacttcccaccgatgagattacctttgctaagcttctgaaggatcaaggttattcaacagcactgatagggaaatggcaccttgggatgagctgtcacagcaagactgacttctgtcaccaccctttacatcacggcttcaattatttctatgggatctctttgaccaatctgagagactgcaagcccggagagggcagtgtcttcaccacgggcttcaagaggctggtcttcctccccctgcagatcgtcggggtcaccctccttacccttgctgcactcaattgtctggggctactccacgtgcctctaggcgtttttttcagccttctcttcctagcagccctaatcctgacccttttcttgggcttccttcattacttccggcccctgaactgcttcatgatgaggaactacgagatcattcagcagcccatgtcctatgacaatctcacccagaggctaacggtggaggcggcccagttcatacagcgg

SEQ ID NO: 406 - DNA, 255 bp, Homo sapiens
atggcgcgaggagacgccccgcgggacagctaccacctggtcgggatcagcttcttcatcctggggctgggcaccctccttccctggaacttcttcatcaccgccatcccgtacttccaggcgcgactggccggggccggcaacagcacagccaggatcctgagcaccaaccacacgggtcccgaggatgccttcaacttcaacaattgggtgacgctgctgtcccagctgcccctgctgctcttcaccctcctc

SEQ ID NO: 407 - DNA, 255 bp, Homo sapiens
atggggcccaagacactcccacagctcgctgggaaatggcaagtgctgtgcatgttgtccttgtgctgctggggctgggtgtctgggcagcttcgttactcagtggtggaggagtctgagccggggacgctggtggggaatgttgctcaggatctgggcttaaagatgacagatctgttgagccggcggctgcaattgggctctgaggagaatgggcgctatttttccctgagcttgatgagtggtgccctggca

SEQ ID NO: 408 - DNA, 255 bp, Homo sapiens
atggaagctggggagaggattgatgccagccagctgcctcacagggtgctggaaacacgtggccatgccattagcatcctgttcggcttctggacgagtttcatctgtgacacctacatagtcctcgcttggatcagcaagataaaaggcagccctgatgttagtgcctcctctgatgagccatacgccagaatccagcagagcagaaggcaatgccacgcagaagaggaccaaagtcaggtgccagaagcaggt

SEQ ID NO: 409 - DNA, 255 bp, Homo sapiens
agctccatgtccatccgctggccgggccgccccctcggaagccatgcctggatactgatagccatgtttcagctcgccgtggacctgcccgcctgtgaggccctgggcccggggccggagttctggctcctgccgcggtcgccgccccggccgccccggctgtggagttttaggagtggacagccagcgcgggtcccggccccggtgtggagcccccggccgccccgagtggagcggatccacgggcagatgcag

SEQ ID NO: 410 - DNA, 255 bp, Homo sapiens
ggaggtctccgggtggtatcgccctttcctctttgccagcccgctggcgagccgagccagggcaagatgaggtcgtcctgtgtcctgctcaccgccctggtggcgctggccgcctattacgtctacatcccgctgcctggctccgtgtccgacccctggaagctgatgctgctggacgccactttccggggtgcacagcaagtgagtaacctgatccactacctgggactgagccatcacctgctggcactgaat

SEQ ID NO: 411 - DNA, 147 bp, Homo sapiens
atgaatgtcacaagtgacaaagcatatgttgcaacttggcttctaatggttgaaaaaaaaagagaggtaaattatcataatgttgggatcttctcaattatatttgcattttcatttctatcagaagtccattttagcaaaggaatg

SEQ ID NO: 412 - DNA, 333 bp, Homo sapiens
atgcagccattcgcttttgccatgccctgtcctgtttacttcttaagaggtttatttttgtacttttgcagaataaactttagtaatctagaactggaaggtactatatatgtatgtgtgtgtatatatatatataaaagaaaaacatatatatatttcaattacttgaaatgtaaaaacttaccgaatacaaatggaaaaagtgatgtgtattatatcatattgctttttgtccatctttgtgatttatttactcacttcatgtttttcatttacaaaattgtcaagttagccaaaataattcttgttttcttaattgggagagaagagacc

SEQ ID NO: 413 - DNA, 243 bp, Homo sapiens
atgccagccatttttgcaaagtgctgtatacaggagatcttgagtgagtgtgtttccctcctcctctttttgggtagctatgttaggctgttcactttgggcatttgccctgaactaaaatccctaagtccctttccccaaggtgaaactaagatagagttttcatatttatcctgtcttattcttttcagggaaaagattttacatctgttgaatttcatccttggtttaaagttgttcttt

SEQ ID NO: 414 - DNA, 255 bp, Homo sapiens
atgacagcaagagagcacagccctcgccatggtgccagggcccgtgcaatgcagcgggcttccaccatcgacgtggcggccgacatgctgggcctctctctggcaggaaatatacaagacccagatgagcccattttagaatttagcttagcttgcagtgagctgcatactccatcgctagatcgaaagccaaatagttttgttgcggtgagtgtcaccacccctcctcaggcattctggacgaagcatgcacag

SEQ ID NO: 415 - DNA, 255 bp, Homo sapiens
atggcagtgcctagtctgtggccctggggagcatgcctgcctgtgatcttcctctccttgggatttggcctggatacagtagaggtgtgccccagcctggatattcgctcagaggtggcagagcttcgtcagctggagaactgcagcgtggtggagggccacctgcagatcctgctcatgttcacagccaccggggaggacttccgcggcctcagcttccctcgcctcacccaggtcaccgactacctgctgctc

SEQ ID NO: 416 - DNA, 561 bp, Homo sapiens
atgaccaacaagtgtctcctccaaattgctctcctgttgtgcttctccactacagctctttccatgagctacaacttgcttggattcctacaaagaagcagcaattttcagtgtcagaagctcctgtggcaattgaatgggaggcttgaatactgcctcaaggacaggatgaactttgacatccctgaggagattaagcagctgcagcagttccagaaggaggacgccgcattgaccatctatgagatgctccagaacatctttgctattttcagacaagattcatctagcactggctggaatgagactattgttgagaacctcctggctaatgtctatcatcagataaaccatctgaagacagtcctggaagaaaaactggagaaagaagatttcaccaggggaaaactcatgagcagtctgcacctgaaaagatattatgggaggattctgcattacctgaaggccaaggagtacagtcactgtgcctggaccatagtcagagtggaaatcctaaggaacttttacttcattaacagacttacaggttacctccgaaac

SEQ ID NO: 417 - DNA, 255 bp, Homo sapiens
atgtggtccttgctgctctgcgggttgtccatcgcccttccactgtctgtcacagcagatggatgcaaggacatttttatgaaaaatgagatactttcagcaagccagccttttgcttttaattgtacattccctcccataacatctggggaagtcagtgtaacatggtataaaaattctagcaaaatcccagtgtccaaaatcatacagtctagaattcaccaggacgagacttggattttgtttctccccatg

SEQ ID NO: 418 - DNA, 255 bp, Homo sapiens
atggagccgctggtgacctgggtggtccccctcctcttcctcttcctgctgtccaggcagggcgctgcctgcagaaccagtgagtgctgttttcaggacccgccatatccggatgcagactcaggctcggcctcgggccctagggacctgagatgctatcggatatccagtgatcgttacgagtgctcctggcagtatgagggtcccacagctggggtcagccacttcctgcggtgttgccttagctccgggcgc

SEQ ID NO: 419 - DNA, 531 bp, Homo sapiens
atgagggagcgacccagattaggtgaggacagttctctcattagccttttcctacaggtggttgcattcttggcaatggtcatgggaacccacacctacagccactggcccagctgctgccccagcaaagggcaggacacctctgaggagctgctgaggtggagcactgtgcctgtgcctcccctagagcctgctaggcccaaccgccacccagagtcctgtagggccagtgaagatggacccctcaacagcagggccatctccccctggagatatgagttggacagagacttgaaccggctcccccaggacctgtaccacgcccgttgcctgtgcccgcactgcgtcagcctacagacaggctcccacatggacccccggggcaactcggagctgctctaccacaaccagactgtcttctaccggcggccatgccatggcgagaagggcacccacaagggctactgcctggagcgcaggctgtaccgtgtttccttagcttgtgtgtgtgtgcggccccgtgtgatgggc

SEQ ID NO: 420 - DNA, 255 bp, Homo sapiens
atgatcatcgtggcgcatgtattactcatccttttgggggccactgagatactgcaagctgacttacttcctgatgaaaagatttcacttctcccacctgtcaatttcaccattaaagttactggtttggctcaagttcttttacaatggaaaccaaatcctgatcaagagcaaaggaatgttaatctagaatatcaagtgaaaataaacgctccaaaagaagatgactatgaaaccagaatcactgaaagcaaa

SEQ ID NO: 421 - DNA, 255 bp, Homo sapiens
atgcgttccccacggacgcgcggccggtccgggcgccccctaagcctcctgctcgccctgctctgtgccctgcgagccaaggtgtgtggggcctcgggtcagttcgagttggagatcctgtccatgcagaacgtgaacggggagctgcagaacgggaactgctgcggcggcgcccggaacccgggagaccgcaagtgcacccgcgacgagtgtgacacatacttcaaagtgtgcctcaaggagtatcagtcccgc

SEQ ID NO: 422 - DNA, 255 bp, Homo sapiens
atggatcgattgaagagccatctgactgtgtgctttctaccttctgtgccctttttaatcctagtatccactctagccaccgctaagagtgtgactaacagcactttaaatggcactaacgtggtcttgggctctgtgcccgtaatcattgccagaactgaccatatcatagtcaaggaagggaacagtgccttgattaactgtagtgtttatggcatccctgacccacagttcaagtggtataattccattggc

SEQ ID NO: 423 - DNA, 885 bp, Homo sapiens
cctggactgctcttcctgctcttcagcagccttcgagctgatactcaggagaaggaagtcagagcgatggtaggcagcgacgtggagctcagctgcgcttgccctgaaggaagccgttttgatttaaatgatgtttacgtatattggcaaaccagtgagtcgaaaaccgtggtgacctaccacatcccacagaacagctccttggaaaacgtggacagccgctaccggaaccgagccctgatgtcaccggccggcatgctgcggggcgacttctccctgcgcttgttcaacgtcaccccccaggacgagcagaagtttcactgcctggtgttgagccaatccctgggattccaggaggttttgagcgttgaggttacactgcatgtggcagcaaacttcagcgtgcccgtcgtcagcgccccccacagcccctcccaggatgagctcaccttcacgtgtacatccataaacggctaccccaggcccaacgtgtactggatcaataagacggacaacagcctgctggaccaggctctgcagaatgacaccgtcttcttgaacatgcggggcttgtatgacgtggtcagcgtgctgaggatcgcacggacccccagcgtgaacattggctgctgcatagagaacgtgcttctgcagcagaacctgactgtcggcagccagacaggaaatgacatcggagagagagacaagatcacagagaatccagtcagtaccggcgagaaaaacgcggccacgtggagcatcctggctgtcctgtgcctgcttgtggtcgtggcggtggccataggctgggtgtgcagggaccgatgcctccaacacagctatgcaggtgcctgggctgtgagtccggagacagagctcactggt

SEQ ID NO: 424 - DNA, 255 bp, Homo sapiens
atgccggggccgccggcgttgcggcggaggctgctgctgctgctgctggtcctcctgatcgccggcagtgctggggccgcgccacttccgcaaacaggtgcaggggaggcgccacctgctgcagaagtttcctcatcttttgtgatcctgtgtgtgtgcagtttaataatattaatagtgttaattgcaaactgtgtatcctgctgtaaggacccagaaatagactttaaggaatttgaagataattttgatgat

SEQ ID NO: 425 - DNA, 480 bp, Homo sapiens
atgtctgaagtaagacccctctccagagacatcttgatggagaccctcctgtatgagcagctcctggaacccccgaccatggaggttcttggcatgactgactctgaagaggacctggaccctatggaggacttcgattctttggaatgcatggagggcagtgacgcattggccctgcggctggcctgcatcggggacgagatggacgtgagcctcagggccccgcgcctggcccagctctccgaggtggccatgcacagcctgggtctggctttcatctacgaccagactgaggacatcagggatgttcttagaagtttcatggacggtttcaccacacttaaggagaacataatgaggttctggagatccccgaaccccgggtcctgggtgtcctgcgaacaggtgctgctggcgctgctgctgctgctggcgctgctgctgccgctgctcagcgggggcctgcacctgctgctcaag

SEQ ID NO: 426 - DNA, 255 bp, Homo sapiens
atggagcagcctgtgttcctgatgacaactgccgctcaggccatctctggcttcttcgtgtggacggccctgctcatcacatgccaccagatctacatgcacctgcgctgctacagctgccccaacgagcagcgctacatcgtgcgcatcctcttcatcgtgcccatctacgcctttgactcctggctcagcctcctcttcttcaccaacgaccagtactacgtgtacttcggcaccgtccgcgactgctatgag

SEQ ID NO: 427 - DNA, 255 bp, Homo sapiens
atgttgctcatggtcgtcagcatggcgtgtgttgggttgttcttggtccagagggccggtccacacatgggtggtcaggacaagcccttcctgtctgcctggcccagcgctgtggtgcctcgcggaggacacgtgactcttcggtgtcactatcgtcataggtttaacaatttcatgctatacaaagaagacagaatccacgttcccatcttccatggcagaatattccaggagggcttcaacatgagccctgtg

SEQ ID NO: 428 - DNA, 636 bp, Homo sapiens
atgtcgctcatggtcgtcagcatggcgtgtgttgggttcttcttgctgcagggggcctggccacaggagggagtccacagaaaaccttccttcctggccctcccaggtcacctggtgaaatcagaagagacagtcatcctgcaatgttggtcggatgtcatgtttgagcacttccttctgcacagagaggggaagtttaacaacactttgcacctcattggagagcaccatgatggggtttccaaggccaacttctccattggtcccatgatgcctgtccttgcaggaacctacagatgctacgggacctacagatgcttcggctctttccgtgacgctccctacgagtggtcaaactcgagtgatccactgcttgtttccgtcacaggaaacccttcaaatagttggccttcacccactgaaccaagctccaaaaccggtaaccccagacacctacatgttctgattgggacctcagtggtcaaaatccctttcaccatcctcctcttctttctccttcatcgctggtgctccgacaaaaaaaatgctgctgtaatggaccaagagcctgcagggaacagaacagtgaacagcgaggattctgatgaacaagaccatcaggaggtgtcatacgca

SEQ ID NO: 429 - DNA, 906 bp, Homo sapiens
atgtcgctcatggtcgtcagcatggcgtgtgttgggttcttcttgctgcagggggcctggccacatgagggagtccacagaaaaccttccctcctggcccacccaggtcgcctggtgaaatcagaagagacagtcatcctgcaatgttggtcagatgtcaggtttgagcacttccttctgcacagagaagggaagtttaaggacactttgcacctcattggagagcaccatgatggggtctccaaagccaacttctccatcggtcccatgatgcaagaccttgcagggacctacagatgctacggttctgttactcactccccctatcagttgtcagctcccagtgaccctctggacatcgtcatcacaggtctatatgagaaaccttctctctcagcccagccgggccccacggttctggcaggagagagcgtgaccttgtcctgcagctcccggagctcctatgacatgtaccatctatccagggagggggaggcccatgaatgtaggttctctgcagggcccaaggtcaacggaacattccaggccgactttcctctgggccctgccacccacggaggaacctacagatgcttcggctctttccgtgactctccatacgagtggtcaaactcgagtgacccactgcttgtttctgtcacaggaaacccttcaaatagttggccttcacccactgaaccaagctctaaaaccggtaacccccgacacctgcacattctgattgggacctcagtggtcatcatcctcttcatcctcctcttctttctccttcatcgctggtgctccaacaaaaaaaatgctgcggtaatggaccaagagtctgcagggaacagaacagcgaatagcgaggactctgatgaacaagaccctcaggaggtgacatac

SEQ ID NO: 430 - DNA, 255 bp, Homo sapiens
atgtcgctcatggtcatcagcatggcgtgtgttgcgttcttcttgctgcagggggcctggccacatgagggattccgcagaaaaccttccctcctggcccacccaggtcccctggtgaaatcagaagagacagtcatcctgcaatgttggtcagatgtcatgtttgagcacttccttctgcacagagaggggacgtttaaccacactttgcgcctcattggagagcacattgatggggtctccaagggcaacttc

SEQ ID NO: 431 - DNA, 729 bp, Homo sapiens
atgggcctggttgtggagatatgggactggagaggagatatgggcctagagtggagatatgggcttggggtggagatctgggcctggggtggagatatgggcctggaggtggagttacgggccttcagtagagatatgggcctggggtggagatatgggcttggggtggagatctgggcctggagtggagatatgggcctggaggtggagttactggccttcagtagagatatgggcctgttgtcagctcccagtgaccctctggacatcgtcatcacaggtctatatgagaaaccttctctctcagcccagccgggccccacggttctggcaggagagagcgtgaccttgtcctgcagctcccggagctcctatgacatgtaccatctatccagggagggggaggcccatgaacgtaggttctctgcagggcccaaggtcaacggaacattccaggctgactttcctctgggccctgccacccacggaggaacctacagatgcttcggctctttccgtgactctccctacgagtggtcaaactcgagtgacccactgcttgtttctgtcacaggaaacccttcaaatagttggccttcacccactgaaccaagctccaaaaccggtaacccaagacacctgcacgttctgattgggacctcagtggtcatcatcctcttcatcctcctcctcttctttctccttcatcgctggtgctccaacaagaaa

SEQ ID NO: 432 - DNA, 255 bp, Homo sapiens
atggggccgcccggctccccatggcagtgggtgacgctgctgctggggctgctgctccctcctgccgcccccttctggctcctcaatgtgctcttccccccgcacaccacgcccaaggctgagctcagtaaccacacacggcccgtcatcctcgtgcccggctgcctggggaatcagctagaagccaagctggacaaaccagatgtggtgaactggatgtgctaccgcaagacagaggacttcttcaccatctgg

SEQ ID NO: 433 - DNA, 771 bp, Homo sapiens
atgggcaccgtgcgcccacctcgcccctcgctcctgctggtctccacccgggagtcttgtctcttcctcctcttctgcctgcacctgggcgccgcctgcccacagccctgccggtgccctgaccacgcaggggctgtggctgtcttctgcagcttgcggggccttcaggaggtccccgaggacatcccggccaacaccgtgctcctgaagctcgatgccaacaagatctcccacctcccggacggggccttccagcacctgcaccggctcagggagctggatctgtctcacaacgccatcgaggccatcggctccgccaccttcgcgggcctggccgggggcctgcggctgctggacctgtcttacaaccgcatccagaggatccccaaggacgccctgggcaaactcagcgccaagatacgcctgtcccacaaccccctgcactgcgagtgcgccctgcaggaggccctgtgggagctgaagctggaccccgactctgtggacgagatcgcctgccacacctcagtgcaggaggagtttgtggggaagcctctggttcaggctctggatgcgggtgccagcctctgcagcgtcccccacaggaccacagacgtggccatgctggtcaccatgttcggctggttcgccatggtgatcgcctacgtcgtgtactatgtgcgccacaaccaggaggatgcccggaggcacctggagtacctgaagtctctgcccagcgcccccgcctccaaggaccccatcggcccggggccc

SEQ ID NO: 434 - DNA, 255 bp, Homo sapiens
atgacgcccgccctcacagccctgctctgccttgggctgagtctgggccccaggacccgcgtgcaggcagggcccttccccaaacccaccctctgggctgagccaggctctgtgatcagctgggggagccccgtgaccatctggtgtcaggggagccaggaggcccaggagtaccgactgcataaagagggaagcccagagcccttggacagaaataacccactggaacccaagaacaaggccagattctccatc

SEQ ID NO: 435 - DNA, 255 bp, Homo sapiens
atgacccccatcgtcacagtcctgatctgtctcgggctgagtctgggccccaggacccacgtgcagacagggaccattcccaagcccaccctgtgggctgagccagactctgtgatcacccaggggagtcccgtcaccctcagttgtcaggggagccttgaagcccaggagtaccgtctatatagggagaaaaaatcagcatcttggattacacggatacgaccagagcttgtgaagaacggccagttccacatc

SEQ ID NO: 436 - DNA, 255 bp, Homo sapiens
atgtcttccacactccctgccctgctctgcgtcgggctgtgtctgagtcagaggatcagcgcccagcagcagactctcccaaaaccgttcatctgggccgagccccatttcatggttccaaaggaaaagcaagtgaccatctgttgccagggaaattatggggctgttgaataccagctgcactttgaaggaagcctttttgccgtggacagaccaaaaccccctgagcggattaacaaagtcaaattctacatc

SEQ ID NO: 437 - DNA, 828 bp, Homo sapiens
atggcctggcgagccctacacccactgctactgctgctgctgctgttcccaggctctcaggcacaatccaaggctcaggtacttcaaagtgtggcagggcagacgctaaccgtgagatgccagtacccgcccacgggcagtctctacgagaagaaaggctggtgtaaggaggcttcagcacttgtgtgcatcaggttagtcaccagctccaagcccaggacgatggcttggacctctcgattcacaatctgggacgaccctgatgctggcttcttcactgtcaccatgactgatctgagagaggaagactcaggacattactggtgtagaatctaccgcccttctgacaactctgtctctaagtccgtcagattctatctggtggtatctccagcctctgcctccacacagacctcctggactccccgcgacctggtctcttcacagacccagacccagagctgtgtgcctcccactgcaggagccagacaagcccctgagtctccatctaccatccctgtcccttcacagccacagaactccacgctccgccctggccctgcagcccccattgccctggtgcctgtgttctgtggactcctcgtagccaagagcctggtgctgtcagccctgctcgtctggtggggggacatatggtggaaaaccatgatggagctcaggagcctggatacccaaaaagccacctgccaccttcaacaggtcacggaccttccctggacctcagtttcctcacctgtagagagagaaatattatatcacactgttgcaaggactaagataagcgatgatgatgatgaacacactttg

SEQ ID NO: 438 - DNA, 255 bp, Homo sapiens
gcccccggcagcgcccggcgacccctgctgctgctactgctgttgctgctgctcggcctcatgcattgtgcgtcagcagcaatgtttatggtgaaaaatggcaacgggaccgcgtgcataatggccaacttctctgctgccttctcagtgaactacgacaccaagagtggccctaagaacatgacctttgacctgccatcagatgccacagtggtgctcaaccgcagctcctgtggaaaagagaacacttctgac

SEQ ID NO: 439 - DNA, 255 bp, Homo sapiens
atgggggaactgatggcgttcctgttacctctcatcattgtgttaatggtgaagcacagcgattcccggacgcactctctgagatattttcgcctgggcgtttcggatcccatccatggggtccctgaatttatttcggttgggtacgtggactcgcaccctatcaccacatatgacagtgtcactcggcagaaggagccacgggccccatggatggcagagaacctcgcgcctgatcactgggagaggtacact

SEQ ID NO: 440 - DNA, 750 bp, Homo sapiens
atggccctcagagcagggctggtcctggggttccacaccctgatgaccctcctgagcccgcaggaggcaggggccaccaaggctgaccacatgggctcctacggacccgccttctaccagtcttacggcgcctcgggccagttcacccatgaatttgatgaggaacagctgttctctgtggacctgaagaaaagcgaggccgtgtggcgtctgcctgagtttggtgactttgcccgctttgacccgcagggtgggctggccggcatcgccgcaatcaaagcccatctggacatcctggtggagcgctccaaccgcagcagagccatcaacgtgcctccacgggtgaccgtgctccccaagtctcgggtggagctgggccagcccaacatcctcatctgcatcgtggacaacatcttcccccctgtgatcaatatcacctggctacgcaacggccaaactgtcactgagggagtggcccagaccagcttctattcccagcctgaccatttgttccgcaagttccactacctgcccttcgtgccctcagccgaggacgtctatgactgccaggtggagcactggggcctggatgcgccactcctcaggcattgggagctccaggtgcctattccaccaccagatgccatggagaccctggtctgtgccctgggtctggccatcggcctggtgggcttcctcgtgggcaccgtcctcatcatcatgggcacatatgtgtccagtgtccccagg

SEQ ID NO: 441 - DNA, 255 bp, Homo sapiens
atgactaccccagccctgctgcccctctctggacgtaggataccacctctgaacctggggccgccttccttcccacatcacagggctaccttgagactttctgagaagtttattcttctccttattcttagtgccttcatcactctgtgttttggggcattctttttccttccagactcttcaaaacacaaacgctttgatttgggtttagaagatgtgttaattccacatgtagatgccggtaaaggggctaaa

SEQ ID NO: 442 - DNA, 891 bp, Homo sapiens
atgaagcacattatcaactcgtatgaaaacatcaacaacacagcaagaaataattccgactgtcctcgtgtggttttgccggaggagatatttttcacaatttccattgttggagttttggagaatctgatcgtcctgctggctgtgttcaagaataagaatctccaggcacccatgtactttttcatctgtagcttggccatatctgatatgctgggcagcctatataagatcttggaaaatatcctgatcatattgagaaacatgggctatctcaagccacgtggcagttttgaaaccacagccgatgacatcatcgactccctgtttgtcctctccctgcttggctccatcttcagcctgtctgtgattgctgcggaccgctacatcaccatcttccacgcactgcggtaccacagcatcgtgaccatgcgccgcactgtggtggtgcttacggtcatctggacgttctgcacggggactggcatcaccatggtgatcttctcccatcatgtgcccacagtgatcaccttcacgtcgctgttcccgctgatgctggtcttcatcctgtgcctctatgtgcacatgttcctgctggctcgatcccacaccaggaagatctccaccctccccagagccaacatgaaaggggccatcacactgaccatcctgctcggggtcttcatcttctgctgggccccctttgtgcttcatgtcctcttgatgacattctgcccaagtaacccctactgcgcctgctacatgtctctcttccaggtgaacggcatgttgatcatgtgcaatgccgtcattgaccccttcatatatgccttccggagcccagagctcagggacgcattcaaaaagatgatcttctgcagcaggtactgg

SEQ ID NO: 443 - DNA, 255 bp, Homo sapiens
atgccctcctgggccctcttcatggtcacctcctgcctcctcctggcccctcaaaacctggcccaagtcagcagccaagatgtctccttgctggcatcagactcagagcccctgaagtgtttctcccgaacatttgaggacctcacttgcttctgggatgaggaagaggcagcgcccagtgggacataccagctgctgtatgcctacccgcgggagaagccccgtgcttgccccctgagttcccagagcatgccc

SEQ ID NO: 444 - DNA, 255 bp, Homo sapiens
atgatggggtgctggattttgaatgagggtctctccaccatattagtactctcatggctgggaataaatttttatctgtttattgacacgttctactggtatgaagaggaggagtctttccattacacacgagttattttgggttcaacactggcttgggcacgagcatccgcactgtgcctgaattttaactgcatgctaattctaatacctgtcagtcgaaaccttatttcattcataagaggaacaagtatt

SEQ ID NO: 445 - DNA, 255 bp, Homo sapiens
atgccctctaagtctctttccaacctctcggtgaccaccggcgcgaatgagagcggttccgttcccgaggggtgggaaagggatttcctgccggcctcggacgggaccaccacggagttggtgatccgctgtgtgatcccgtccctctacctgctcatcatcaccgtgggcttgctgggcaacatcatgctggtgaagatcttcatcaccaacagcgccatgaggagcgtccccaacatcttcatctctaacctg

SEQ ID NO: 446 - DNA, 714 bp, Homo sapiens
atgcgcctcaacagctccgcgccgggaaccccgggcacgccggccgccgaccccttccagcgggcgcaggccggactggaggaggcgctgctggccccgggcttcggcaacgcttcgggcaacgcgtcggagcgcgtcctggcggcacccagcagcgagctggacgtgaacaccgacatctactccaaggtgctggtgaccgccgtgtacctggcgctcttcgtggtgggcacggtgggcaacacggtgacggcgttcacgctggcgcggaagaagtcgctgcagagcctgcagagcacggtgcattaccacctgggcagcctggcgctgtccgacctgctcaccctgctgctggccatgcccgtggagctgtacaacttcatctgggtgcaccacccctgggccttcggcgacgccggctgccgcggctactacttcctgcgcgacgcctgcacctacgccacggccctcaacgtggccagcctgagtgtggagcgctacctggccatctgccaccccttcaaggccaagaccctcatgtcccgaagccgcaccaagaagttcatcagcgccatctggctcgcctcggccctgctggcggtgcctatgctgttcaccatgggcgagcagaaccgcagcgccgacggccagcacgccggcggcctggtgtgcacccccaccatccacactgccaccgtcaaggtcgtcatacag

SEQ ID NO: 447 - DNA, 255 bp, Homo sapiens
atggctcagtttgtccaggtcctggctgaaataggtgactttggtcgcttccagatacagctattgatcctgctgtgtgttctcaacttcctgtctcccttctacttttttgcccatgtcttcatggtcctagatgagccccaccactgtgcagtggcttgggtgaagaaccacactttcaacctgagtgctgctgaacagctggtactgagcgtgcccctggacactgcaggtcacccagagccctgcctcatg

SEQ ID NO: 448 - DNA, 255 bp, Homo sapiens
atgaacacctctcacctcctggccttgctgctcccaaaatctccacaaggtgaaaacagaagcaaacccctgggcaccccatacaacttctctgaacattgccaggattccgtggacgtgatggtcttcatcgtcacttcctacagcattgagactgtcgtgggggtcctgggtaacctctgcctgatgtgtgtgactgtgaggcagaaggagaaagccaacgtgaccaacctgcttatcgccaacctggccttc

SEQ ID NO: 449 - DNA, 255 bp, Homo sapiens
atgactcgatcgccgcccctcagagagctgcccccgagttacacacccccagctcgaaccgcagcaccccagatcctagctgggagcctgaaggctccactctggcttcgtgcttacttccagggcctgctcttctctctgggatgcgggatccagagacattgtggcaaagtgctctttctgggactgttggcctttggggccctggcattaggtctccgcatggccattattgagacaaacttggaacagctc

SEQ ID NO: 450 - DNA, 255 bp, Homo sapiens
atggctggcgattctaggaatgccatgaaccaggacatggagattggagtcactccctgggaccccaagaagattccaaaacaggcccgcgattatgtccccattgccacagaccgtacgcgcctgctggccgagggcaagaagccacgccagcgctacatggagaagagtggcaagtgcaacgtgcaccacggcaacgtccaggagacctaccggtacctgagtgacctcttcaccaccctggtggacctcaag

SEQ ID NO: 451 - DNA, 255 bp, Homo sapiens
atggatgtgtgtggctggaaagaaatggaggttgcgctggtcaattttgataattcagatgaaatccaagaagagccaggctatgccacagacttcgactcaaccagcccaaaaggccggcctgggggcagctccttctccaacgggaagatcctcatcagcgaaagcaccaaccatgagacggccttctccaagcttccgggagactatgctgaccccccagggcctgagccagtggtcctaaatgaaggaaac

SEQ ID NO: 452 - DNA, 255 bp, Homo sapiens
atgaccctcttaccgggagacaattctgactacgactacagcgcgctgagctgcacctcggacgcctccttccacccggccttcctcccgcagcgccaggccatcaagggcgcgttctaccgccgggcgcagcggctgcggccgcaggatgagccccgccagggctgtcagcccgaggaccgccgccgtcggatcatcatcaacgtaggcggcatcaagtactcgctgccctggaccacgctggacgagttcccg

SEQ ID NO: 453 - DNA, 255 bp, Homo sapiens
atgaccatggctgggggcaggaggggactagtggcccctcaaaacacgtttctggagaatattgttcggcggtccaatgatactaattttgtgttggggaatgctcagatagtggactggcctattgtgtacagcaatgatggattttgcaagctgtctggctatcacagggcagaagtgatgcaaaaaagcagcacctgcagttttatgtatggggagctgactgataaagacacgattgaaaaagtgcggcaa

SEQ ID NO: 454 - DNA, 165 bp, Homo sapiens
atggaatctcccaaatgcctatactcacgcataactgttaacacggcatttggtactaaattctcacacataagctttattatattatttaaggtattcttattcccaagaattactatttcaaagaaaaccaagttggtcactttaagcaactatttgaataaa

SEQ ID NO: 455 - DNA, 255 bp, Homo sapiens
atgccaagtaggaaatttgccgatggtgaagtggtaagaggtcgatggcctgggagttcactttattatgaagtagaaattctgagccacgacagcacctcccagctttacactgtgaagtataaagatggaacagagcttgaattgaaagagaatgatattaagcctttaacttcctttaggcaaaggaaaggtggctcaacttccagttccccttccagacgccgagggagtcgatcaaggtcacgctcccga

SEQ ID NO: 456 - DNA, 813 bp, Homo sapiens
ataattagcatcatcattattctggctggagcaattgcactcatcattggctttggtatttcagggagacactccatcacagtcactactgtcgcctcagctgggaacattggggaggatggaatcctgagctgcacttttgaacctgacatcaaactttctgatatcgtgatacaatggctgaaggaaggtgttttaggcttggtccatgagttcaaagaaggcaaagatgagctgtcggagcaggatgaaatgttcagaggccggacagcagtgtttgctgatcaagtgatagttggcaatgcctctttgcggctgaaaaacgtgcaactcacagatgctggcacctacaaatgttatatcatcacttctaaaggcaaggggaatgctaaccttgagtataaaactggagccttcagcatgccggaagtgaatgtggactataatgccagctcagagaccttgcggtgtgaggctccccgatggttcccccagcccacagtggtctgggcatcccaagttgaccagggagccaacttctcggaagtctccaataccagctttgagctgaactctgagaatgtgaccatgaaggttgtgtctgtgctctacaatgttacgatcaacaacacatactcctgtatgattgaaaatgacattgccaaagcaacaggggatatcaaagtgacagaatcggagatcaaaaggcggagtcacctacagctgctaaactcaaaggcttctctgtgtgtctcttctttctttgccatcagctgggcacttctgcctctcagcccttacctgatgctaaaa

SEQ ID NO: 457 - DNA, 255 bp, Homo sapiens
atgaagtcgccgttctaccgctgccagaacaccacctctgtggaaaaaggcaactcggcggtgatgggcggggtgctcttcagcaccggcctcctgggcaacctgctggccctggggctgctggcgcgctcggggctggggtggtgctcgcggcgtccactgcgcccgctgccctcggtcttctacatgctggtgtgtggcctgacggtcaccgacttgctgggcaagtgcctcctaagcccggtggtgctggct

SEQ ID NO: 458 - DNA, 255 bp, Homo sapiens
atgagcccttgcgggcccctcaacctgagcctggcgggcgaggcgaccacatgcgcggcgccctgggtccccaacacgtcggccgtgccgccgtcgggcgcttcgcccgcgctgcccatcttctccatgacgctgggcgccgtgtccaacctgctggcgctggcgctgctggcgcaggccgcgggccgcctgcgacgccgccgctcggccgccaccttcctgctgttcgtggccagcctgctggccaccgacctg

SEQ ID NO: 459 - DNA, 255 bp, Homo sapiens
atgaaggagacccggggctacggaggggatgcccccttctgcacccgcctcaaccactcctacacaggcatgtgggcgcccgagcgttccgccgaggcgcggggcaacctcacgcgccctccagggtctggcgaggattgcggatcggtgtccgtggccttcccgatcaccatgctgctcactggtttcgtgggcaacgcactggccatgctgctcgtgtcgcgcagctaccggcgccgggagagcaagcgcaag

SEQ ID NO: 460 - DNA, 255 bp, Homo sapiens
atggagatggaaaaggagttcgagcagatcgacaagtccgggagctgggcggccatttaccaggatatccgacatgaagccagtgacttcccatgtagagtggccaagcttcctaagaacaaaaaccgaaataggtacagagacgtcagtccctttgaccatagtcggattaaactacatcaagaagataatgactatatcaacgctagtttgataaaaatggaagaagcccaaaggagttacattcttacccag

SEQ ID NO: 461 - DNA, 255 bp, Homo sapiens
ctttttctgtttcagatcctgtgcgcaggtggcacccctagtccaattcctgacccttcagtagcaactgttgccacaggggaaaatggcataacgcagatcagcagtacagcagaatcctttcataaacagaatggaactggaacacctcaggtggaaacaaacaccagtgaggatggtgaaagctctggagccaacgatagtttaagaacacctgaacaaggatctaatgggactgatggggcatctcaaaaa

SEQ ID NO: 462 - DNA, 255 bp, Homo sapiens
atggcgcccacctggggccctggcatggtgtctgtggttggtcccatgggcctccttgtggtcctgctcgttggaggctgtgcagcagaagagccccccaggtttatcaaagaacccaaggaccagatcggcgtgtcggggggtgtggcctctttcgtgtgtcaggccacgggtgaccccaagccacgagtgacctggaacaagaagggcaagaaggtcaactctcagcgctttgagacgattgagtttgatgag

SEQ ID NO: 463 - DNA, 837 bp, Homo sapiens
ggcagcctctacgtctggaagagcgaactgcccagggaccatcccgcggtcatcaagcgacgcttcaccagcgtcctggtggtgtccagtctctcacccctgtgcgtgctgctctggagggaactcacaggcatccagccaggcacatccctgctcaccctgatgggcttcaggctggagggcattttcccagcggcgctgctgcccctgttgctgaccatgattcttttcctgggcccactgatgcagctctctatggattgcccttgtgacctggcagatgggctgaaggttgtcctggccccccgctcctgggcccgctgcctcacagacatgcgttggctgcggaaccaagtgatcgccccgctgacagaggagctggtgttccgggcctgtatgctgcccatgttagcaccgtgcatgggcctgggccctgctgtgttcacctgcccgctcttttttggagttgcccattttcaccatattattgagcagctgcgtttccgccagagcagcgtggggaacatcttcttgtctgctgcgttccagttctcctacacagctgtcttcggtgcctacactgctttcctcttcatccgcacaggacacctgattgggccggttctctgccattccttctgcaattacatgggtttcccagctgtttgcgcggccttggagcacccacagaggcggcccctgctggcaggctatgccctgggtgtgggactcttcctgcttctgctccagcccctcacggaccccaagctctacggcagccttcccctttgtgtgcttttggagcgggcaggggactcagaggctcccctgtgctcc

SEQ ID NO: 464 - DNA, 255 bp, Homo sapiens
atggcgaccgtccgggcctctctgcgaggtgcgctgctccttctgctggccgtggcgggggtcgcggaggtggcagggggcctggctccgggcagtgcgggtgcattgtgttgtaatcattcaaaggataaccaaatgtgccgtgatgtatgtgaacagattttctcctcaaaaagtgaatcccgactaaaacatctgttgcagcgagccccagattattgcccagagacaatggttgaaatttggaattgtatg

SEQ ID NO: 465 - DNA, 255 bp, Homo sapiens
atggcaccttctcatcgggcatcacaggtggggttttgccccacccctgaacgccctctgtggcgccttccacccacctgtaggcccagaaggatgtcggtctgctaccgtcccccagggaacgagacactgctgagctggaagacttcgcgggccacaggcacagccttcctgctgctggcggcgctgctggggctgcctggcaacggcttcgtggtgtggagcttggcgggctggcggcctgcacgggggcga

SEQ ID NO: 466 - DNA, 255 bp, Homo sapiens
atggccacgcttctccttctccttggggtgctggtggtaagcccagacgctctggggagcacaacagcagtgcagacacccacctccggagagcctttggtctctactagcgagcccctgagctcaaagatgtacaccacttcaataacaagtgaccctaaggccgacagcactggggaccagacctcagccctacctccctcaacttccatcaatgagggatcccctctttggacttccattggtgccagcact

SEQ ID NO: 467 - DNA, 255 bp, Homo sapiens
gagctgggcctccagaagagaggatgctgtctggtgctgggctacatggccaaggacaagtttcggagaatgaatgaaggccaagtctattccttcagccagcagccccaggaccaggtggtggtgtcgggacagccagtgacgctactttgcgccatccccgaatacgatggcttcgttctgtggatcaaggacggcttggctctgggtgtgggcagggacctctcaagttacccacagtacctggtggtaggg

SEQ ID NO: 468 - DNA, 255 bp, Homo sapiens
atggctgagcaccgaagcatggacgggagaatggaagcagccacacgggggggctctcacctccaggctgcagcccagacgccccccaggccggggccaccatcagcaccaccaccaccacccaaggaggggcaccaggaggggctggtggagctgcccgcctcgttccgggagctgctcaccttcttctgcaccaatgccaccatccacggcgccatccgcctggtctgctcccgcgggaaccgcctcaagacg

SEQ ID NO: 469 - DNA, 864 bp, Homo sapiens
atgaagctgctgcggcgggcgtggcggcggcgggcggcgctaggcctgggcacgctggcgctgtgcggggcggcgctgctctacctggcgcgctgcgcggccgagcccggggaccccagggcgatgtcgggccgcagcccgcctccccccgcgcccgcgcgcgccgccgccttcctggcagtgctggtggccagcgcgccccgcgccgccgagcgccgcagcgtgatccgcagcacgtggcttgcgcggcgcggggccccgggcgacgtgtgggcgcgctttgccgtgggcacggccggcctgggcgccgaggagcggcgcgccctggagcgggagcaggcgcggcacggggacctgctgctgctgcccgcgctgcgcgacgcctacgaaaacctcacggccaaggtgctggccatgctggcctggctggacgagcacgtggccttcgagttcgtgctcaaggcggacgacgactccttcgcgcgggacgcgctgctggccgagctgcgcgcccgcgagcccgcgcgccgccgccgcctctactggggcttcttctcgggccgcgccgcccgcgactacttgcgcgcctggcacagcgaggacgtgtctctgggcgcctggctggcgccggtggacgtccagcgggagcacgacccgcgcttcgacaccgaataccggtcccgcggctgcagcaaccagtacctggtgacgcacaagcagagcctggaggacatgctggagaagcacgcgacgctggcgcgcgagggccgcctgtgcaagcgcgaggtgcagctgcgcctgtcctacgtgtacgactggtccgcgccgccctcgcagtgctgccagagaagggagggcatcccc

SEQ ID NO: 470 - DNA, 255 bp, Homo sapiens
atggggaaattgatcaggatggggccgcaagagaggtggttactccggacaaagcggcttcattggagtcgcctcctcttcttactgggaatgttgatcatcggttctacttatcagcaccttaggagaccccggggcctttcctcattgtgggcagcagtctcttctcatcagcctataaaactggccagtcgggacctctccagtgaagagatgatgatgatgagcagcagcccttcaaaacctagctccgaa

SEQ ID NO: 471 - DNA, 255 bp, Homo sapiens
atggacgagtcccctgagcctctgcagcagggcagagggccggtgccggtccgacggcagcgcccagcaccccggggtctgcgtgagatgctgaaggccaggctgtggtgcagctgctcgtgcagtgtgctgtgcgtccgggcgctggtgcaggacctgctccccgccacgcgctggctgcgtcagtaccgcccgcgggagtacctggcaggcgacgtcatgtctgggctggtcatcggcatcatcctggtgccg

SEQ ID NO: 472 - DNA, 255 bp, Homo sapiens
atggccagtacggttagccccagcaccatagctgagaccccagagccacctccattgtctgaccacatccgaaatgctgctgacatctcagtcattgtcatctattttctggtggtgatggctgttgggctgtgggcgatgctgaagaccaaccgaggtactataggaggcttcttcctcgctggtcgtgatatggcctggtggccgatgggcgcctctctctttgccagtaacatcggcagcaaccactatgtg

SEQ ID NO: 473 - DNA, 255 bp, Homo sapiens
agcctggggaccatcctgttgtacgccgtcgtgggtaccgtgtggaacgcggccaccaccgggctgtccctctacggcgtcttcctcagtgggctcatgggcgacctgcagattgggctgctggacttcctcctgtttggcagcctcatggcggctgtggacccggtggccgtcctggccgtgtttgaggaggtccatgtcaacgaggtcctgttcatcatcgtcttcggggagtcgctgctgaacgacgcagtc

SEQ ID NO: 474 - DNA, 255 bp, Homo sapiens
ttagagctcttccgctggcagtggcacgaggtggaggcgccctacctggtggccctgtggatcctggtggccagtctggccaaaatcgtgtttcacctgtctcggaaagtaacatctctggtccctgagagctgcctgctgattttgctgggcctggtgctagggggaattgttttggctgtggccaagaaagctgagtaccagctggagccaggcaccttcttcctcttcctgctgcctcctattgtgttggac

SEQ ID NO: 475 - DNA, 255 bp, Homo sapiens
atggacatgcttcatccatcatcggtgtccacgacctcagaacctgagaatgcctcctcggcctggcccccagatgccaccctgggcaacgtgtcggcgggcccaagcccggcagggctggccgtcagtggcgttctgatccccctggtctacctggtggtgtgcgtggtgggcctgctgggtaactcgctggtcatctatgtggtcctgcggcacacggccagcccttcagtcaccaacgtctacatcctcaac

SEQ ID NO: 476 - DNA, 255 bp, Homo sapiens
atgagcgccccctcgacgctgccccccgggggcgaggaagggctggggacggcctggccctctgcagccaatgccagtagcgctccggcggaggcggaggaggcggtggcggggcccggggacgcgcgggcggcgggcatggtcgctatccagtgcatctacgcgctggtgtgcctggtggggctggtgggcaacgccctggtcatcttcgtgatccttcgctacgccaagatgaagacggctaccaacatctac

SEQ ID NO: 477 - DNA, 255 bp, Homo sapiens
atggagcccctgttcccagcctccacgcccagctggaacgcctcctccccgggggctgcctctggaggcggtgacaacaggacgctggtggggccggcgccctcggcaggggcccgggcggtgctggtgcccgtgctgtacctgctggtgtgtgcggccgggctgggcgggaacacgctggtcatctacgtggtgctgcgcttcgccaagatgaagaccgtcaccaacatctacattctcaacctggcagtggcc

SEQ ID NO: 478 - DNA, 255 bp, Homo sapiens
atgctgctgctggcgagatgtctgctgctagtcctcgtctcctcgctgctggtatgctcgggactggcgtgcggaccgggcagggggttcgggaagaggaggcaccccaaaaagctgacccctttagcctacaagcagtttatccccaatgtggccgagaagaccctaggcgccagcggaaggtatgaagggaagatctccagaaactccgagcgatttaaggaactcacccccaattacaaccccgacatcata

SEQ ID NO: 479 - DNA, 255 bp, Homo sapiens
atgaagcccaacttctccctgcgactgcggatcttcaacctcaactgctggggcattccgtacttgagcaagcaccgggccgaccgcatgaggcgcctgggagactttctgaaccaggagagcttcgacctggctttgctggaggaggtgtggagtgagcaggacttccagtacctgagacagaagctgtcacctacctacccagctgcacaccacttccggagcggaatcattggcagtggcctctgtgtcttc

SEQ ID NO: 480 - DNA, 255 bp, Homo sapiens
atggataacgtcctcccggtggactcagacctctccccaaacatctccactaacacctcggaacccaatcagttcgtgcaaccagcctggcaaattgtcctttgggcagctgcctacacggtcattgtggtgacctctgtggtgggcaacgtggtagtgatgtggatcatcttagcccacaaaagaatgaggacagtgacgaactattttctggtgaacctggccttcgcggaggcctccatggctgcattcaat

SEQ ID NO: 481 - DNA, 255 bp, Homo sapiens
atgtggcccaacggcagttccctggggccctgtttccggcccacaaacattaccctggaggagagacggctgatcgcctcgccctggttcgccgcctccttctgcgtggtgggcctggcctccaacctgctggccctgagcgtgctggcgggcgcgcggcaggggggttcgcacacgcgctcctccttcctcaccttcctctgcggcctcgtcctcaccgacttcctggggctgctggtgaccggtaccatcgtg

SEQ ID NO: 482 - DNA, 789 bp, Homo sapiens
atggaaaacgagacagtcagtgaactgaaccaaacacagcttcagccacgagcagtggtggccttagaataccaggtggtcaccatcttacttgtactcattatttgtggcctgggcattgtaggcaacatcatggtagtcctggttgtcatgagaaccaagcacatgaggacccccacaaactgctacctggtgagcctggcagtagctgatctcatggtcttggtggccgcaggcctccccaacataacagacagtatctacggttcctgggtctatggctatgttggatgcctctgcattacttacctccagtatttgggaattaatgcatcctcttgttcaataacagcctttaccattgagaggtacatagcaatctgtcaccccatcaaagcccagtttctctgcacattttccagagccaaaaagattatcatctttgtctgggctttcacatctctttactgtatgctctggttcttcttgctggatctcaatattagcacctacaaagatgctattgtgatatcctgtggctacaagatctccaggaattactactcacctatttacctaatggactttggtgtcttttatgttgtgccaatgatcctggctaccgtcctctatggattcatagctagaatccttttcttaaatcccattccttcagatcctaaagaaaactctaagacatggaaaaatgattcaacccatcagaacacaaatctgaatgtaaatacctctaatagatgtttcaacagcacagtatcttcaaggaagcag

SEQ ID NO: 483 - DNA, 255 bp, Homo sapiens
atggagcggctttggggtctattccagagagcgcaacaactgtccccaagatcctctcagaccgtctaccagcgtgtggaaggcccccggaaagggcacctggaggaggaagaggaagacggggaggagggggcggagacattggcccacttctgccccatggagctgaggggccctgagcccctgggctctagacccaggcagccaaacctcattccctgggcggcagcaggacggagggctgccccctacctg

SEQ ID NO: 484 - DNA, 378 bp, Homo sapiens
gacccgcccgtggctgcagcagtggtgtcccattttaatgactgcccagattcccacactcagttctgcttccatggaacctgcaggtttttggtgcaggaggacaagccagcatgtgtctgccattctgggtacgttggtgcacgctgtgagcatgcggacctcctggccgtggtggctgccagccagaagaagcaggccatcaccgccttggtggtggtctccatcgtggccctggctgtccttatcatcacatgtgtgctgatacactgctgccaggtccgaaaacactgtgagtggtgccgggccctcatctgccggcacgagaagcccagcgccctcctgaagggaagaaccgcttgctgccactcagaaaca

SEQ ID NO: 485 - DNA, 255 bp, Homo sapiens
tatatccgtgtatcctatgacaccaagccagactcactgctccatctcatggtgaaagattggcagctggaactccccaagctcttaatatctgtgcatggaggcctccagaactttgagatgcagcccaagctgaaacaagtctttgggaaaggcctgatcaaggctgctatgaccaccggggcctggatcttcaccgggggtgtcagcacaggtgttatcagccacgtaggggatgccttgaaagaccactcc

SEQ ID NO: 486 - DNA, 255 bp, Homo sapiens
atggggggttttctacctaaggcagaagggcccgggagccaactccagaaacttctgccctcctttctggtcagagaacaagactgggaccagcacctggacaagcttcatatgctgcagcagaagaggattctagagtctccactgcttcgagcatccaaggaaaatgacctgtctgttcttaggcaacttctactggactgcacctgtgacgttcgacaaagaggagccctgggggagacggcgctgcacata

SEQ ID NO: 487 - DNA, 714 bp, Homo sapiens
tcagtgtttctggaggccaaggatgcccattcggtcctgaaacgattccctcgtgccaatgagttcctggaggagctgcgccagggcaccatcgagcgagagtgcatggaggagatctgcagctacgaggaggtcaaggaagtgtttgagaacaaagagaaaacggcattaccactttttcttttgcagatggagttctggaaagggtacccaaatgcagtctactctgtccgagacccctcgcagagctcagatgccatgtatgtggtggtaccccttctgggggtggcactgctgattgtcatcgccttgttcatcatctggaggtgccagctgcagaaagcgacccgtcaccacccctcctatgctcagaaccggtacctagccagtcgcgccgggcacaccctcccccgggtcatggtgtaccggggtactgtgcatagccaaggggagccttctgggcaccgagaggcagcgaacagcccccaggtggtgctggggcccagtcgggggggcaggaccacagtccggctagagagcaccctctacctccctgagctctctctctccagactgtccagcaccacccctcccccctcctacgaggaggtgactgcgccccaagagagcagcagtgaggaggccagcgtgtcttacagtgacccacccccaaagtacgaggagatagtggccgccaaccctggcgctgacaag

SEQ ID NO: 488 - DNA, 255 bp, Homo sapiens
agcctgatgctggatgaccaaccccctatggaggcccagtatgcagaggagggcccaggacctgggatcttcagagcagagcctggagaccagcagcatcccatttctcaggcagtgtgctggcgttccatgcgacgtggctgtgcagtgctgggagccctggggctgctggccggtgcaggtgttggctcatggctcctagtgctgtatctgtgtcctgctgcctctcagcccatttccgggaccttgcaggat

SEQ ID NO: 489 - DNA, 255 bp, Homo sapiens
atgcggctccctgacctgagaccctggacctccctgctgctggtggacgcggctttactgtggctgcttcagggccctctggggactttgcttcctcaagggctgccaggactatggctggaggggaccctgcggctgggagggctgtgggggctgctaaagctaagagggctgctgggatttgtggggacactgctgctcccgctctgtctggccacccccctgactgtctccctgagagccctggtcgcgggg

SEQ ID NO: 490 - DNA, 255 bp, Homo sapiens
gtctcagctgagtctgctctgatcacccaacaagacctagctccccagcagagagcggccccacaacaaaagaggtccagcccctcagagggattgtgtccacctggacaccatatctcagaagacggtagagattgcatctcctgcaaatatggacaggactatagcactcactggaatgacctccttttctgcttgcgctgcaccaggtgtgattcaggtgaagtggagctaagtccctgcaccacgaccaga

SEQ ID NO: 491 - DNA, 255 bp, Homo sapiens
atggcttcaaaggtctcctgtttgtatgttttgacagttgtgtgctgggccagcgctctctggtacttgagtataactcgccctacttcttcttacactggctccaaaccattcagccacctaacagttgccaggaaaaacttcacctttggcaacataagaactcgacctatcaacccacattcttttgaatttcttatcaacgagcccaataaatgtgagaaaaacattccttttcttgttatcctcatcagc

SEQ ID NO: 492 - DNA, 255 bp, Homo sapiens
atgaggcttcgggagccgctcctgagcggcagcgccgcgatgccaggcgcgtccctacagcgggcctgccgcctgctcgtggccgtctgcgctctgcaccttggcgtcaccctcgtttactacctggctggccgcgacctgagccgcctgccccaactggtcggagtctccacaccgctgcagggcggctcgaacagtgccgccgccatcgggcagtcctccggggagctccggaccggaggggcccggccgccg

SEQ ID NO: 493 - DNA, 255 bp, Homo sapiens
atggggctctgggcgctgttgcctggctgggtttctgctacgctgctgctggcgctggccgctctgcccgcagccctggctgccaacagcagtggccgatggtggggtattgtgaacgtagcctcctccacgaacctgcttacagactccaagagtctgcaactggtactcgagcccagtctgcagctgttgagccgcaaacagcggcgtctgatacgccaaaatccggggatcctgcacagcgtgagtgggggg

SEQ ID NO: 494 - DNA, 255 bp, Homo sapiens
atgagggcgcggccgcaggtctgcgaggcgctgctcttcgccctggcgctccagaccggcgtgtgctatggcatcaagtggctggcgctgtccaagacaccatcggccctggcactgaaccagacgcaacactgcaagcagctggagggtctggtgtctgcacaggtgcagctgtgccgcagcaacctggagctcatgcacacggtggtgcacgccgcccgcgaggtcatgaaggcctgtcgccgggcctttgcc

SEQ ID NO: 495 - DNA, 255 bp, Homo sapiens
atggcgtgcaggcagagaggaggctcttggagtccctcaggctggttcaatgcaggctggagcacctacaggtcgatttctctcttcttcgcccttgtgacttcagggaactccatagatgtttctcagttggtaaatcctgcctttccaggcactgtcacttgcgatgaaagggaaataacagtggagttcccaagcagtcctggcaccaagaaatggcatgcatctgtggtggatcctcttggtctcgacatg

SEQ ID NO: 496 - DNA, 255 bp, Homo sapiens
atgctactgctgctgctactgctgccacccctgctctgtgggagagtgggggctaaggaacagaaggattacctgctgacaatgcagaagtccgtgacggtgcaggagggcctgtgtgtctctgtgctttgctccttctcctacccccaaaatggctggactgcctccgatccagttcatggctactggttccgggcaggggaccatgtaagccggaacattccagtggccacaaacaacccagctcgagcagtg

SEQ ID NO: 497 - DNA, 255 bp, Homo sapiens
aatgtagtttcacaaagcagcttaaccccattgatggtgaacgggattctgggggagtcagtaactcttcccctggagtttcctgcaggagagaaggtcaacttcatcacttggcttttcaatgaaacatctcttgccttcatagtaccccatgaaaccaaaagtccagaaatccacgtgactaatccgaaacagggaaagcgactgaacttcacccagtcctactccctgcaactcagcaacctgaagatggaa

SEQ ID NO: 498 - DNA, 255 bp, Homo sapiens
gccatgctgcgcctggggctgtgcgcggcggcgctgctgtgcgtgtgccggccgggtgccgtgcgtgccgactgctggctcattgagggcgacaagggctacgtgtggctggccatctgcagccagaaccagccgccctacgagaccatcccgcagcacatcaatagcaccgtgcacgacctgcggctcaacgagaacaagctcaaagccgtgctctactcctcgctcaaccgctttgggaacctcaccgacctc

SEQ ID NO: 499 - DNA, 525 bp, Homo sapiens
ctcctggactgttttgtgatcccagtcgtgattttgctctcctggttcttcctgctgatccggtacaaggctgtgcatttcatcggcatcgttgtctgcatcctgggaatgggctgcatggtgggagcagatgtgcttgtgggaagacatcagggagcaggggaaaataagctggtaggggaccttctggtcttaggaggagccacactctatggtatttctaacgtctgggaagaatacatcatccgaactctgagccgagtggaattcctgggaatgattggtctctttggagcatttttcagtggaattcaattagctataatggagcataaggaactgttgaaggtgccctgggactggcaaataggactgctctacgttggctttagtgcctgcatgtttggtctctacagctttatgccagtcgtcataaagaaaaccagtgccacttcagtcaacctctccttgctcacagcagacttgtacagcctgttctgtggattgtttctcttccactacaag

SEQ ID NO: 500 - DNA, 255 bp, Homo sapiens
atggcgccaccaccagctagagtacatctaggtgcgttcctggcagtgactccgaatcccgggagcgcagcgagtgggacagaggcagccgcggccacacccagcaaagtgtggggctcttccgcggggaggattgaaccacgaggcgggggccgaggagcgctccctacctccatgggacagcacggacccagtgcccgggcccgggcagggcgcgccccaggacccaggccggcgcgggaagccagccctcgg

SEQ ID NO: 501 - DNA, 255 bp, Homo sapiens
atggggcctggagcttcaggggacggggtcaggactgagacagctccacacatagcactggactccagagttggtctgcacgcctacgacatcagcgtggtggtcatctactttgtcttcgtcattgctgtggggatctggtcgtccatccgtgcaagtcgagggaccattggcggctatttcctggccgggaggtccatgagctggtggccaattggagcatctctgatgtccagcaatgtgggcagtggcttg

SEQ ID NO: 502 - DNA, 291 bp, Homo sapiens
attgtcactgggctttggggtcagtcagtaacaggaaacagaccagaagaaagagatcccttcctcctttttcctccaacttgctggcactatctagctccccctcttggcagaaccgaaaagggagcagctggtaaaacagaagtgtatttccagagtgtcagccacagtctcacaaagctaaaacacaataaagcaaggttgaagctgagaggcaataacttaatcatcagcccagtactcagttgttttccaataatagttctagttgaattgatgcaccatatttat

SEQ ID NO: 503 - DNA, 255 bp, Homo sapiens
atggggctggatgcactggtgcccctggcagtgacagtggccatcttcctgctcctggtggacctgatgcagcagcaccaacgctggactgcacgctacccgccaggccccctgccactgcccgggctgggcaacttgctgcatgtggacttccagaacatatacaccttcaaccagctgcggcaccgctttggggacgtgttcagcctgcagctggcctggatgccggtggtcgtgctcaatgggctggcggcc

SEQ ID NO: 504 - DNA, 591 bp, Homo sapiens
atgagcatggaatatttctccatctgttttgtgtccactctgatttctctgagcagttgtttgtggttctccttgaagaggtccttcactttctttcttagctgtattcctaggtatttttttctctttgtagcaaatgtgaatgaaagttcattcatgatttgtctccctgcttgcctgttgtttgtgcatgggaatgctagctacttttgcacattgattttatatcctgagattttgctactgttgcttatcaccttaagaagctttgggcctgagacaatgaggttttctagatgtaggatcaggtcatctgcaaacaaagataatttgacttcctctctttctattagaatactctttatttcttcctctggcctgattttcctggccaaggcttctgatactatattgaatggtagtggtgaaagagggcattcttttcttgtgccagttttcaggtggaacgtttctagcttttgcacattcagtatgatattggctgtgggtttgttgtatatggctcttattattttcaggtatgtttcttcacttcctagtttattgagaattttaaacctgaaggaatgc

SEQ ID NO: 505 - DNA, 330 bp, Homo sapiens
aatctaatagactgcagtcagggtatcagccaggactgggttctcattagagactcatctcgaacaggatctgctttcaagctccctcaggttgctggcaggattcattttgttgtagctgcaggattcgtggctgcttgcttctgcacatccagaaatgggtggagagagagacagagacagagagggagagagatccagcaagagagttgctataatcttatgcaatcacttaggttgatttcctctctttgcaattgtgaattgtgctgcattaagcatgcacatgcaggtgtgtttttttatacagtgacttgtattcctttgggt

SEQ ID NO: 506 - DNA, 255 bp, Homo sapiens
atgagccaggacaccaaagtgaagacaacagagtccagtcccccagccccatccaaggccaggaagttgctgcctgtcctggacccatctggggattactactactggtggctgaacacaatggtcttcccagtcatgtataacctcatcatcctcgtgtgcagagcctgcttccccgacttgcagcacggttatctggtggcctggttggtgctggactacacgagtgacctgctatacctactagacatggtg

SEQ ID NO: 507 - DNA, 255 bp, Homo sapiens
tttacatctataactgatagtattatttttctttgcacttacagtacggccaagtacagcgtgttgacatttctacctcgattcttgtatgagcagattagaagagctgctaatgccttctttctcttcattgccttattacagcaaattccagatgtatctccaacaggaagatataccaccctggtgccattgatcattattttaacaattgcaggcatcaaagagattgtagaagattttgtggcagtggga

SEQ ID NO: 508 - DNA, 819 bp, Homo sapiens
gtcaacaataaacggcttggtgtatgtggctggatcctgttttccctctctttcctgttggtgatcattaccttccccatctccatatggatgtgcttgaagatcattaaggagtatgaacgtgctgttgtattccgtctgggacgcatccaagctgacaaagccaaggggccaggtttgatcctggtcctgccatgcatagatgtgtttgtcaaagttgacctccgaacagttacttgcaacattcctccacaagagatcctcaccagagactccgtaactactcaggtagatggagttgtctattacagaatctatagtgctgtctcagcagtggctaatgtcaacgatgtccatcaagcaacatttctgctggctcaaaccactctgagaaatgtcttagggacacagaccttgtcccagatcttagctggacgagaagagatcgcccatagcatccagactttacttgatgatgccaccgaactgtgggggatccgggtggcccgagtggaaatcaaagatgttcggattcccgtgcagttgcagagatccatggcagccgaggctgaggccacccgggaagcgagagccaaggtccttgcagctgaaggagaaatgaatgcttccaaatccctgaagtcagcctccatggtgctggctgagtctcccatagctctccagctgcgctacctgcagaccttgagcacggtagccaccgagaagaattctacgattgtgtttcctctgcccatgaatatactagagggcattggtggcgtcagctatgataaccacaagaagcttccaaataaagcc

SEQ ID NO: 509 - DNA, 723 bp, Homo sapiens
gcttgctgggcccctgggaatggcaatgtttctgaagggcccatatctgcaccctcccaggactaccgggtgaatgtcttcttgcggcaacagtggaatgacccacgcctgtcctaccgagaatatcctgatgactctctggacctcgatccctccatgctggactctatctggaagccagacctcttctttgctaatgagaaaggggccaacttccatgaggtgaccacggacaacaagttactgcgcatcttcaagaatgggaatgtgctgtacagcatcaggctgaccctcattttgtcctgcctgatggacctcaagaacttccccatggacatccagacctgcacgatgcagcttgagagctttggctacaccatgaaagacctcgtgtttgagtggctggaagatgctcctgctgtccaagtggctgaggggctgactctgccccagtttatcttgcgggatgagaaggatctaggctgttgtaccaagcactacaacacagggaaattcacctgcatcgaggtaaagtttcacctggaacggcagatgggctactatctgattcagatgtacatccccagcctactcatcgtcatcctgtcctgggtctccttctggatcaacatggatgctgcccctgcccgtgtgggcctgggcatcaccaccgtgctcaccatgaccacccagagctctggctcccgggcctctttgcctaag

SEQ ID NO: 510 - DNA, 255 bp, Homo sapiens
tttccatttagcatccttttctccacctttttgtactgtggggaggctgcatctgctttgtacatggttagaatctatcgaaagaatagtgaaacttactggatgacatacaccttttctttctttatgttttcatccattatggtccagttgaccctcatttttgtccacagagatctagccaaagataaaccgctatcattatttatgcatctaatcctcttgggacctgttatcagatgtttggaggccatg

SEQ ID NO: 511 - DNA, 252 bp, Homo sapiens
atggtggcgagacttggcactttcctcaagaatgcctgggccagggagccagtgctggttgtgtccttcatcattggtagcctagctgtaattctgcccccactcagcccctacaccaagtacttcatcatgatctacgagaccatgccctacaactacccattgcccgtccgcaatgatgggaacatgaccaatgtgcccggccacccccaggatccccagagctccagcttggagtggctgaagaaactg

SEQ ID NO: 512 - DNA, 552 bp, Homo sapiens
aatgatgaggctggccttatgtatggattgagtccgtttcctggctctccgtttgaaacagagcttgggcagcatgtgcctgagatgcagctagtgatgacggtggccatggctgtcctcgtgcgggagctgctgccaggagctctggccactggataccttttataccttcagattaaaagggacatttttcatggccgcctgctgtgctccttttctgatgctgcctacctgggtgcctgtattgttcaagctgagcttggtgattacgatcctgatgagcatcctgagaattacatcagtgagtttgagattttccccaagcagtcacagaagctggaaagaaaaatagtggaaattcataaaaatgaactcagggggcagagcccaccagttgctgaatttaacttgctcctgaaagctcacactttggaaacctacggggtggatcctcacccatgcaaggattcaacaggcacaacaacatttttaggattcacagctgcaggctttgtggtctttcagggaaataagagaatccatttgataaaa

SEQ ID NO: 513 - DNA, 372 bp, Homo sapiens
ttctctcctatcaacagcggccagccccccaactatgagatgctcaaggaggagcatgaggtggctgtgctgggggtggcctacaaccctgctcccccgacgtccaccgtgatccacatccgcaacgagacctccgtgcccgaccatgttgtctggtccctgttcaacactctcttcatgaacccctgctgcctgggcttcatagcattcgcttactccgtgaagtctaggcacaggaagatggttggcgacctgactggcgcccaggcctatgcctccaccgccaagtgcctgaacatctgggccctgattttgggcatcttcatgaccattctgctcatcatcatcccagtgttgatcttccaagcctat

SEQ ID NO: 514 - DNA, 255 bp, Homo sapiens
atgggggactggaacttattgggtggcatcctagaggaagttcactcccactcaaccatagtggggaaaatctggctgaccatcctcttcatcttccgaatgctggtacttcgtgtggctgctgaggatgtctgggatgatgaacagtcagcatttgcctgcaacacccggcagccaggttgcaacaatatctgttatgatgatgcattccctatctctttgatcaggttctgggttttacagatcatctttgtg

SEQ ID NO: 515 - DNA, 696 bp, Homo sapiens
tccaggttcatgaaccaccgagtccctgcccacaagaggtaccagcccacagagtatgaacatgcggccaactgtgccacccatgctttctggatcatccccagcatcctgggcagctccaacctctacttcctgtcggacgatgactgggagaccatctctgcctggatctacggcctcggcctctgcggcctcttcgtggtgtccactgtgtttcacaccatctcctggaagaagagccacctcaggatggtggaacactgtctacacatgttcgaccggatggtcatctatttcttcatagcggcttcctacgcaccctggctgaaccttcgggagctgggcccctgggcctcccacatgcgctggctggtctggattatggcttccgtgggcaccatctatgtcttcttcttccatgagcggtacaagcttgtggagcttctctgctacgtcgtaatgggcttcttccccgccctggtcatcctctccatgcccaacaccgagggcatctgggagctggtgaccggaggggtcttctactgcctgggcatggtcttcttcaagagtgacgggaggatcccctttgcccacgccatctggcatctctttgtagcatttggtgctggtacccactactatgccatctggaggtacctctatctgcccagcaccctgcagaccaaggtgtccaaa

SEQ ID NO: 516 - DNA, 906 bp, Homo sapiens
ttcctcctcctgggaatctcagaggatccagaactgcagcccgtcctcgctgggctgaccctgtccatgtacctggtcacggtgctgaggaacctgctcatcatcctggctgtcagctctgactcccacctccacacctccatgtacttcgtcctctccaacctgcgctgggttgacatcggtttcacctcggccacggttcccaagatgattgtggacatgcagtcgcatagcagagtcatctcttatgcgggctgcctgacacagatgtctttcttggtcttttttgcatgtatagaagacatgctcctgactgtgatgtcctatgaccaatttttggccatctgtcaccccctgcactacccagtcatcgtgaatcctcacttctgtgtcttcttagttttggtgtcctttttccttagcctgttggattcccagctgcatagatggattgtgttacaattcaccttcttcaagaatgtggaaatctctaattttgtctgtgagccatctcaacttctcaaccttgcctgttctgacagcgtcatcaatatcatattcatatatttagatagtactatgtttggttttcttcccatttcagggatccttttgtcttactataaaattgtcccctccattctaaggatgtcattgtcagatgtgaagtataaagccttctccacctgtggctctcacctggcagttttttgcttattttacggagcaggcattggcgtgtacctgacttcagctgtgtcaccaccttccggcaatggtgtggtggcttcagtgatgtacactgtggtcacccccatgctgaaccctttcatctacagcctgagaaacagggacattcaaagtgccccgtggaggctgcgcagcacaacagttgaatctcatgat

SEQ ID NO: 517 - DNA, 255 bp, Homo sapiens
gaaaaccaaaccattctggtggaattttttctgaagggacattctgttcacccaaggcttgagttactcttttttgtgctaatcttcataatgtatgtggtcatccttctggggaatggtactctcattttaatcagcatcttggaccctcaccttcacacccctatgtacttctttctggggaacctctccttcttggacatctgctacaccaccacctctattccctccacactagtgagcttcctttcagaa

SEQ ID NO: 518 - DNA, 255 bp, Homo sapiens
atggagacaagaaattactctgccatgactgaattctttctggtggggctttcccaatatccagagctccagctttttctgttcctgctctgcctcatcatgtacatgataatcctcctgggaaatagcctcctcattatcatcaccatcttggattctcgcctccatactcccatgtatttctttcttggaaacctctcattcttggacatctgttacacatcctcatccattcctccaatgcttattatattt

SEQ ID NO: 519 - DNA, 705 bp, Homo sapiens
cttgcacgcggacaccaggtggcgctgtcgtctatcagctatgtgggctgctccctctccgtgctctgcctggtggccacgctggtcaccttcgccgtgctgtcctccgtgagcaccatccggaaccagcgctaccacatccacgccaacctgtccttcgccgtgctggtggcccaggtcctgctgctcattagtttccgcctcgagccgggcacgaccccctgccaagtgatggccgtgctcctacactacttcttcctgagtgccttcgcatggatgctggtggaggggctgcacctctacagcatggtgatcaaggtctttgggtcggaggacagcaagcaccgttactactatgggatgggatggggttttcctcttctgatctgcatcatttcactgtcatttgccatggacagttacggaacaagcaacaattgctggctgtcgttggcgagtggcgccatctgggcctttgtagcccctgccctgtttgtcatcgtgggctcctctgggccagtgactgagggtcttatttcccggaatgctcaggaaggcggtgctttccaggcgggtccactcgaggccccagggctcttccagtcgaggcggcaggtcaacattggcatcctcatcgctgtgaccagagtcatctcacagatcagcgccgacaactacaagatccatggagaccccagtgccttc

SEQ ID NO: 520 - DNA, 255 bp, Homo sapiens
atgccactccctgacggggcgcggaccccggggggcgtctgccgggaggcgcgcggcgggggctacaccaaccggaccttcgagtttgacgacggccaatgcgcccccaggcggccctgcgcgggggacggcgcgctcctggacaccgccggcttcaagatgagcgacctggactccgaggtgctgcccttgccgccgcgctaccgcttccgggacctgctgctgggcgacccgtccttccagaacgacgacagg

SEQ ID NO: 521 - DNA, 255 bp, Homo sapiens
atggagcagacagaaaaatcaaaagtatatgctgagaacggactcttagaaaagataaagctttgcctttcaaagaaaccactgccatctcccactgagcgaaagaagtttgaccatgactttgccatctccacttcctttcatgggatacacaatattgttcagaaccggagcaaaattcgcagggtgctctggttggtggtggttctgggctcagtctcacttgtgacatggcagatctacattcgcttgctc

SEQ ID NO: 522 - DNA, 537 bp, Homo sapiens
cattttggactctggagtgtactgatggttctcatcctaaactccactttatttttctttcaaaatttatcctcctactgtcattcccaaataaactccactctaaaggggaggtggcgagtttctccctcccaccgcgccctagccctcctcctctgtctgctgacacctccgttcacccacagcataagggagctgttgccattgaaccgaggggcagccctcgaccaagcccatagggatgtagcagaccaatgggccgggggctgtgtccccggaaagccggggcgtcagcctggcaggcaacaagcgaggcccctccctactcagcagagctgccgtggcctgcacgcccatcctcccttgctaggagtctgttttatttttttgtactttcaaaatgagcatcccccagacagtctgcctggcatgattgatgctgggggtggaagcttttcacagtccttggcctctgaccctgcttcccgagggcggcgcggcttctgcgcgcctgctgggggccgctcgggcatgtgc

SEQ ID NO: 523 - DNA, 327 bp, Homo sapiens
tttgttcgcagcaattacaccgccttgttgggagtgtggatctatggatttttcgtgttgatgctgctggttctggaccttttgtattactcggcaatgaactacgacatctgcaaggtctacctggcacggtggggcatccaaggacgatggatgaaacaggacccccggcggtgggggaaccccgctcgggcccctcggccgggtcagcgggccccacagccgcagcctcccccaggcccgctgccacaagccccacaggccgtgcacacattgcggggagatgctcacagcccaccgctgatgaccttccagagttcgtctgcc

SEQ ID NO: 524 - DNA, 255 bp, Homo sapiens
aacctaaaagaaataaccttaatagtaggtgtggttactgcctgctattggaacagcctcttttgtggttttgtttttgatgatgtttcagcaatactggataacaaagacttgcatccatctacacctttaaaaactttatttcaaaatgacttctggggaacccctatgtctgaggagagaagccacaagtcttaccgtcccttaacagtattgacatttcgcttaaattatttgttaagtgaactaaaacca

SEQ ID NO: 525 - DNA, 261 bp, Homo sapiens
aaccctcctgactggtcgaagaatgtggagtatataacagagtttgtaaacctaggcaatgtttcagctctacgcactttcagggtactgagggctttgaaaactatttcggtaatcccaggcctgaagacaattgtgggtgccctgattcagtctgtgaagaaactgtcagatgtgatgatcctgacagtgttctgcctgagtgtttttgccttgatcggactgcagctgttcatggggaaccttcgaaacaagtgtgtt

SEQ ID NO: 526 - DNA, 408 bp, Homo sapiens
atgcagaccaccggggtattactcatttctccagctctgatctgctgttgtaccaggggtctaatcaggcctgtgtctgccttctccttgaatagcccagagaattcatctaaacagccttcctacagcagctccccactccaggtggccagacgggagttccagaccagtgttgtctcccgggacactgacacagccgccaagtttattggtgctgggtcagccacagttggtgtggctgattcaggggctggcattggagcggtgtttggcagcttgattattgtctatgccaggaagctgtctctcaagcagcaactcctcttctatgccattctgggctttgccctgtctgaggccatggggctcttctgtttgatgatctccttcttcatcctgttcgccatg

SEQ ID NO: 527 - DNA, 222 bp, Homo sapiens
tctcctagtgttttgacgaaacctcaggtgtatggccttctagccaagtacctgtggtttcacattgttggagcatttgtggtattctggctggtggcagctctctatcaaattgctgtggctgaaccaagaaagaaggcatacacagatttctacagaaattacgattccatgaaagattttgaggacatgaggaagactggtacttttcagagtgcaaag

SEQ ID NO: 528 - DNA, 882 bp, Homo sapiens
atgaagggcggcgagggggacgcgggcgagcaggccccgctgaaccctgagggcgagagccctgcaggctcggccacgtaccgggagttcgtgcaccgcggctacctggacctcatgggggccagtcagcactcgctgcgggcgctcagctggcgccgcctctacctcagccgggccaagctcaaagcttccagccgcacgtctgccttgctctcgggcttcgccatggtggccatggtggaggtgcagctggagagtgaccacgagtacccaccaggcctgctggtggccttcagtgcctgcaccaccgtgctggtggctgtgcacctctttgcactcatggtctccacgtgtctgctgccccacattgaagctgtgagcaacatccacaacctcaactctgtccaccagtcgccacaccagagactgcaccgctacgtggagctggcctggggcttctccactgccctgggcacctttctcttccttgctgaagttgtcctggttggttgggtcaagtttgtgcccattggggctcccttggacacaccgacccccatggtgcccacatcccgggtgcccgggactctggcaccagtggctacctcccttagtccagcttccaatctcccacggtcctctgcgtctgcagcaccgtcccaggctgagccagcctgcccaccccggcaagcctgtggtggtggtggggcccatgggccatggcaagcagccatggcctccacagccatcatggtacccgtggggctcgtgtttgtggcctttgccctgcatttctaccgctccttggtggcacacaagacagaccgctacaagcaggaactagaggaactgaatcgcctgcagggggagctgcaggctgtg

SEQ ID NO: 529 - DNA, 255 bp, Homo sapiens
atggtgggtgaaggaccctaccttatctcagatctggaccagcgaggccggcggagatcctttgcagaaagatatgaccccagcctgaagaccatgatcccagtgcgaccctgtgcaaggttagcacccaacccggtggatgatgccgggctactctccttcgccacattttcctggctcacgccggtgatggtgaaaggctaccggcaaaggctgaccgtagacaccctgcccccattgtcgacatatgactca

SEQ ID NO: 530 - DNA, 255 bp, Homo sapiens
tgggaggccagcttggctctacagcatgccagtgaggccctgttgacagtgagtgccaaggcccgccctgaggaccagaggcgccaggcagccaccagggacctgtttcaggctgtgggcagtgtgctggaagcttccctgagcaacagaccagaagagcctgcggaggccagcagcagccagattgccacagtgctgcggctgcttcgagtcatggagcatgtgcagaccaccctcctgctgggaaaactgcca

SEQ ID NO: 531 - DNA, 894 bp, Homo sapiens
atggctggggggatgtcagcggagtgccctgagcctgggccaggaggtctgcagggccagtccccagggccaggcaggcagtgtccccctcccatcacgcccacctcctggagcctgcccccgtggagggcctacgtggctgccgccgtcctctgctacatcaacctcctgaattacatgaactggttcatcattgcaggagtgctgctggatatacaggaggttttccagatcagtgacaaccatgctggtttgcttcagactgtcttcgttagctgcctgctgctgtctgcacctgtgtttggctacctgggcgaccgacatagccgcaaggctaccatgagcttcggtatcttgctgtggtcaggagctggcctctctagctccttcatctccccccggtattcttggctcttcttcctgtcccggggcatcgtgggcactggctcggccagctactccaccatcgcgcccaccgtcctgggcgacctcttcgtgagggaccagcgcacccgcgtgctggctgtcttctacatctttatccccgttggaagtggtctgggctacgtgctggggtcggctgtgacgatgctgactgggaactggcgctgggccctccgagtcatgccctgcctggaggccgtggccttgatcctgcttatcctgctggttccagacccacccccggggagctgccgagacacagggggagggggccgtgggaggcttcaggagcagctggtctggagtttcgtgtggtcgaccctcggagtgaccgccatggcctttgtgactggagccctggggttctgggcccccaagtttctgctcgaggcacgcgtggttcacgggctgcagcctccctgcttccaggagccgtgcagcaaccccgac

SEQ ID NO: 532 - DNA, 255 bp, Homo sapiens
tcccatagctggggctttgtgcaccctcggttgctcagcgtgcccgagctctgccaccatgtagctgaagtctgggttagtgggaccattttcataaggaatgttttgcttttcaaaaagcaaaacccaggcaagttctgcttgctgagctgtgggatactgacctttttggctgtcttgggccgctacgtccctgggcttctgctgtcctacttgatgcttgtcactgtcatgatgtggccccttgctgtgtac

SEQ ID NO: 533 - DNA, 234 bp, Homo sapiens
atgactcttcaaaagatgtcaaaacttgtatggccctcactattcttttcttctgggattcccattatgcatatgttggtattgattgtaacccacagatttcctacttggttcatttttcattctcacttctgttcttcagattgtgtaatttgtattgatttatctttgagttcactgattcttccttctgcattcaagtttgctgttgtccctctaatgaagctttcactt

SEQ ID NO: 534 - DNA, 201 bp, Homo sapiens
gaccacttgatctggtcggtgttcagcaccctctacctgaatctgtgttgcctcggcttcctggcgctggcctactccatcaaggcccgagatcagaaggtggttggtgacctggaagcggcccggcgttttggctccaaagccaagtgctacaacatcctggccgcgatgtggacgctggtgccgccactgctgctcctg

SEQ ID NO: 535 - DNA, 255 bp, Homo sapiens
atgctactgccactgctgctgtcctcgctgctgggcgggtcccaggctatggatgggagattctggatacgagtgcaggagtcagtgatggtgccggagggcctgtgcatctctgtgccctgctctttctcctacccccgacaggactggacagggtctaccccagcttatggctactggttcaaagcagtgactgagacaaccaagggtgctcctgtggccacaaaccaccagagtcgagaggtggaaatgagc

SEQ ID NO: 536 - DNA, 300 bp, Homo sapiens
atggagacccgccaggtgtccaggagccctcgggttcggctgctgctgctgctgctgctgctgctggtggtgccctggggcgtccgcactgcctcgggagtcgccctgcccccggtcggggtcctcagcctccgccccccaggacgggcctgggcggatcccgccacccccaggccgcggaggagcctggcgctggcggacgacgcggccttccgggagcgcgcgcggttgctggccgccctcgagcgccgccactggctgaactcgtacatgcacaagctgctggtgttggatgcgccc

SEQ ID NO: 537 - DNA, 255 bp, Homo sapiens
cggctccagccgacgctgttgctggcgacactgagcgcggcctttggctcagccttccagtacggctacaacctctctgtggtcaacacgccgcacaaggtcttcaagtcattttacaacgaaacctactttgagcgacacgcaacattcatggacgggaagctcatgctgcttctatggtcttgcaccgtctccatgtttcctctgggcggcctgttggggtcattgctcgtgggcctgctggttgatagctgc

SEQ ID NO: 538 - DNA, 255 bp, Homo sapiens
atgacggtttcatacactctcaaagtggcggaggcccgcttcggaggtttctctggcctgcttctccgctggaggggaagcatctacaagctcctctacaaggaattcctcctctttggggccttgtacgctgtgcttagcatcacctaccggctgctgctgacccaggagcagaggtacgtgtatgctcaggtggcccggtactgcaaccgctcagcagacctcattcccttgtcctttgtattgggtttctat

SEQ ID NO: 539 - DNA, 522 bp, Homo sapiens
agcctctataatacgccctgtgtcctggacctacagcgggccctggttcaggatcgccaagaggcgccctggaatgaggtggatgaggtctggcccaatgtcttcatagctgagaagagtgtggctgtgaacaaggggaggctgaagaggctgggaatcacccacattctgaatgctgcgcatggcaccggcgtttacactggccccgaattctacactggcctggagatccagtacctgggtgtagaggtggatgactttcctgaggtggacatttcccagcatttccggaaggcgtctgagttcctggatgaggcgctgctgacttacagagggaaagtcctggtcagcagcgaaatgggcatcagccggtcagcagtgctggtggtcgcctacctgatgatcttccacaacatggccatcctggaggctttgatgaccgtgcgtaagaagcgggccatctaccccaatgagggcttcctgaagcagctgcgggagctcaatgagaagttgatggaggag

SEQ ID NO: 540 - DNA, 255 bp, Homo sapiens
atgctggatgggtccccgctggcgcgctggctggccgcggccttcgggctgacgctgctgctcgccgcgctgcgcccttcggccgcctacttcgggctgacgggcagcgagcccctgaccatcctcccgctgaccctggagccagaggcggctgcccaggcgcactacaaggcctgcgaccggctgaagctggagcggaagcagcggcgcatgtgccgccgggacccgggcgtggcagagacgctggtggaggcc

SEQ ID NO: 541 - DNA, 255 bp, Homo sapiens
atgaggaacattttcaagaggaaccaggagcctattgtggctcctgccaccaccaccgccacgatgcccattggacccgtggacaactccactgagagtgggggtgctggggagagccaggaggacatgtttgccaaactgaaggagaagttattcaatgagataaacaagattcccttaccaccctgggcactgatcgccattgctgtggttgctgggctcctgcttctcacctgctgcttctgcatctgcaag

SEQ ID NO: 542 - DNA, 246 bp, Homo sapiens
atactctgccagatcattagtcaggtcaagaagcatccaagcttgatgcccctctttgtatttattggagttggagatactggagcagcactgtatctcttgtttctggcattgttcaatccagatgttaattgggacagaaagaataactcagagccctggaacaaactggatcccaatgatcagtacaagttctactcagtgaatgtggattacagcaaactaaagaaagaaggtccagatttc

SEQ ID NO: 543 - DNA, 882 bp, Homo sapiens
gaattcctccttctgggactctcagaggatccagaactgcagaccatccttgctgggctgtccctgtccatgtatctggtcacggtgctgaggaacctgctcagcatcctggctgtcagctctgactcccacccccacacacccatgtacttcttcctctccaacctgtgctgggctgacatcggtttcaccttggccacggttcccaagatgattgtggacatggggtcgcatagcagagtcatctcttatgggggctgcctgacacagatgtctttcttggtactttttgcatgtatagtaaacatgttcctgactgtgatggcttatgactgctttgtagccatctgtcgccctctgcactacccagtcatcgtgaatcctcacctctgtgtcttcttcgttttggtgtcctttttccttagcctgttggattcccagctgcacagttggattgtgttacaattcaccttcttcaagaatgtggaaatctctaattttgtctgtgagccatctcaacttctcaagcttgcctcttatgacagcgtcatcaatagcatattcatatattttgataatactatgtttggttttcttcccatttcagggatccttttgtcttactataaaattgtcccctccattctaaggatttcatcatcagatgggaagtacaaagccttctcagcctgtggctgtcacctggcagttgtttgcttattttatggaacaggcattggcgtgtacctgacttcagctgtggcaccacccctcaggaatggtatggtggcgtcagtgatgtacgctgtggtcacccccatgctgaaccctttcatctacagcctgagaaacagggacattcaaagtgccctgtggagggtg

SEQ ID NO: 544 - DNA, 255 bp, Homo sapiens
ttggctttagggtgcctgtccttgcttgtgacggtccagcacacagaacgctatgtcaccctgtttgcctctatcatcctcaaatgtgactacaccacctctgcccagctccaggacgtggtggtgacatggcgcttcaagtccttctgcaaggaccctatctttgactactactcagcgtcataccaggcagctttatccctgggccaggacccatccaatgactgcaacgacaaccagcgggaagttcgcata

SEQ ID NO: 545 - DNA, 255 bp, Homo sapiens
atgagagccaattgttccagcagctcagcctgccctgccaacagttcagaggaggagctgccagtgggactggaggtgcatggaaacctggagctcgttttcacagtggtgtccactgtgatgatggggctgctcatgttctctttgggatgttccgtggagatccggaagctgtggtcgcacatcaggagaccctggggcattgctgtgggactgctctgccagtttgggctcatgccttttacagcttatctc

SEQ ID NO: 546 - DNA, 429 bp, Homo sapiens
ggtgcagccagtgtcatcgttggccaccctctggacacagtcaagactcgcctgcaggctggcgttggctacggaaacaccctcagctgcatccgcgtggtgtacaggagggagagtatgttcggcttcttcaagggcatgtccttccccctcgccagcattgccgtctacaactccgtggtgtttggggtcttcagtaacacgcagcggttcctcagccagcaccgctgcggggagccagaggccagtcctccccgcacgctgtcagacctgctcctggccagcatggtggccggcgtggtctctgtcgggctgggagggcccgtggacctcatcaagatccggttgcagatgcagacacaaccgtttcgggacggtaagaggccaggggagcggaggctggtgtctgggacttgtggccctttcctg

SEQ ID NO: 547 - DNA, 627 bp, Homo sapiens
caggtttacggagcggtgatgaacataaatcgtgggaacccctttcaaaaggaagtggtgttggattcatggccggatttcaaagctgttatcacccgacgacaaagagaggctgagacagataaccttgatcattatactaatgcctatgctgtgttctacaaggatgtcagggcttatcgacagctattggaagaatgtgatgtttttaactgggaccaagtttttcaaatacaaggtgaggtcaagtgcaagacttatattacacagtcttttttttcctccttagcatatatccagatagtcctatttgtttttgtgtcattctggtctagcaaggggccttccccacgactaacctacctgagtgttgccaatgcggatctactcaaccggacttggtcccggggaggcaatgaacaatgtctccggtacatcgccaacctcatctcctgcttccctagtgtgtgtgtccgggatgagaagggaaacccggtctcctggtccatcacagaccagtttgccaccatgtgccatggctacaccctgccagaacatcgcaggaaaggttacagccggctggtggccctcacgctggccaggaagttgcaaagccggggattcccc

SEQ ID NO: 548 - DNA, 477 bp, Homo sapiens
ctgtttgagatcctggccaagaccccgtatggccacgagaagaaaaacctgcttgggatccaccagctgctggcagagggtgtcctcagtgccgccttccccctgcatgacggccccttcaagacgcccccagagggcccgcaggctccacgcctcaaccagcgccaagtccttttccagcactgggcgcgctggggcaagtggaacaagtaccagcccctggaccacgtgcgcaggtacttcggggagaaggtggccctctacttcgcctggctcgggttttacacaggctggctcctgccagcggcagtggtgggcacactggtgttcctggtgggctgcttcctggtgttctcagacatacccacgcaggaactgtgtggcagcaaggacagcttcgagatgtgcccactttgcctcgactgccctttctggctgctctccagcgcctgtgccctggcccaggtacgagaagag

SEQ ID NO: 549 - DNA, 816 bp, Homo sapiens
agctggcattcccaggcctatgcccttggggccgtttccaactttatgtctacttttctgacctttcctatctataaggttgtgttccggcaacagatccatgccatggcagtgtcagaggctgtgagacagctttggcatgaaggtcctcaatacttctaccggggaatctaccctcctcttctctccaagacgttgcaagggactcttctgtttgggacttatgatagcctgctgtgctttctctctcctgttgggccacacaccctgggacaccgctgggctgccgggctcatgtctggcgtggtggaggccgtggcactcagcccctttgaaagggtgcaaaatgtgctccaggatggtcgcaagcaagctcgcttccccagcaccttcagcattctcaaggaattcaattcttatgggctttgggggcggctgtcactgggctactatcgtggtttctggcctgtcctggccaggaacagcctggggagtgctctatatttttctttcaaggaccccatccaggatggcctggcagagcaaggcctgccccactgggttcctgccttggtgtctggtagtgtcaatggaacaatcacctgcctagttctgtatcctctgattgtgctggttgctaatatgcagtcccatattggatggcagaacatgccaagcctgtgggcctctgcccaggatgtatggaacactcggggccgaaagctgctcctgatctaccgtggaggctccctagtcatcctaaggtccagtgtgacatggggcctcactacggcaatccatgacttcctgcagagg

SEQ ID NO: 550 - DNA, 255 bp, Homo sapiens
atggaatcatctttctcatttggagtgatccttgctgtcctggcctccctcatcattgctactaacacactagtggctgtggctgtgctgctgttgatccacaagaatgatggtgtcagtctctgcttcaccttgaatctggctgtggctgacaccttgattggtgtggccatctctggcctactcacagaccagctctccagcccttctcggcccacacagaagaccctgtgcagcctgcggatggcatttgtc

SEQ ID NO: 551 - DNA, 636 bp, Homo sapiens
atgggggtggccatcctggagcccacactgcccatctggatgatgcagaccatgtgctcccccaagtggcagctgggtctagctttcttgcctgccagtgtgtcctacctcattggcaccaacctctttggtgtgttggccaacaagatgggtcggtggctgtgttccctaatcgggatgctggtagtaggtaccagcttgctctgtgttcctctggctcacaatatttttggtctcattggccccaatgcagggcttggccttgccataggcatggtggattcttctatgatgcccatcatggggcacctggtggatctacgccacacctcggtgtatgggagtgtctacgccatcgctgatgtggctttttgcatgggctttgctataggtccatccaccggtggtgccattgtaaaggccatcggttttccctggctcatggtcatcactggggtcatcaacatcgtctatgctccactctgctactacctgcggagccccccggcaaaggaagagaagcttgctattctgagtcaggactgccccatggagacccggatgtatgcaacccagaagcccacgaaggaatttcctctgggggaggacagtgatgaggagcctgaccatgaggag

SEQ ID NO: 552 - DNA, 153 bp, Homo sapiens
atggggtattatacttttattttttcggtttctcttcattcattcagtgggttatgggtatgtgtgtgtgtgtgtgtgtgtttcacacattatgtgctaggcactatttcaggcacttggaacttacattattgtaggggtacaactggaaac

SEQ ID NO: 553 - DNA, 420 bp, Homo sapiens
atggagactttgtaccgcgtcccattagtgctcaaatgtcccaacctgaagctgaagaagccgaccaggctgcacatgccctcggccatgactatgtatgccctggtggtggtgtcttgcttcctcatcaccagaggaataatttatgatgttattgttgaacctcaaagtgttggctctgtgaccgatgaacatgggcatcagaggccagtagctttcttggtgtacagagtaaatggacagtatattatggaaggacttgcatccagcttcctgtttacaatggagggtttaggtttcataatcctgtaccaatcgaatgcaccaaatatcccaaaacccagtagatttcttcttctattcattggatttgtctgtgtcctgttgagtttttttatggctagagtattcatgagaatg

SEQ ID NO: 554 - DNA, 438 bp, Homo sapiens
atgtgcacccccattagggggctgctcatggcccttgcagtgatgtttgggacagcgatggcatttgcacccataccccggatcacctgggagcacagagaggtgcacctggtgcagtttcatgagccagacatctacaactactcagccttgctgctgagcgaggacaaggacaccttgtacataggtgcccgggaggcggtcttcgctgtgaacgcactcaacatctccgagaagcagcatgagacagagtgcctcaactacatccgggtgctgcagccactcagcgccacttccctttacgtgtgtgggaccaacgcattccagccggcctgtgaccacctgaacttaacatcctttaagtttctggggaaaaatgaagatggcaaaggaagatgtccctttgacccagcacacagctacacatccgtcatggtt

SEQ ID NO: 555 - DNA, 255 bp, Homo sapiens
atgcatcgccggagactggccctgggtctggggttctgcctgttggcgggcacaagcctcagtgtcctgtgggtgtatcttgagaactggctgccagtctcctatgtcccctattatctcccctgcccagagatcttcaacatgaagctgcactacaagagggagaagccactccagcccgtggtatggtcacagtaccctcagcccaagctgctggagcacaggcccacacagctgctgacactcacaccctgg

SEQ ID NO: 556 - DNA, 474 bp, Homo sapiens
atggcttctggaaggctcattaagttcgtggtttttgagctcctagagtttgccgctttctccatccccacactcgtgatcacagaacagtttgccaccgcctaccaaggaacaagggctagatctgacaacacacactactggctgatcatctcctgttctattgcctatgttgcgttagtgactctactgatctgggttcctgtaaaagttatcctgcacaagaaacgttatatttacagaaaaattaaaggatggagacctgttctgatgatgtgtgtggtcctcaccacactgccctgcctcaccttttccatagcagtgactgaggttcaaaagagcattaatgggtccgctgatgtcttacctgatatgttacctgacctgcccgtatctctggttctgttatccctgatcatggttgatattattaactcaggatatatcctcttagagggagtcaaaagagtaagt

SEQ ID NO: 557 - DNA, 834 bp, Homo sapiens
tattgcagtatccaggctgaaggaacatcacagaataccagcagaaaagaagacttcaatcaaacattgacatccaatgaacaaaccagtagagctgatgatctcattgagacggccaaagtttttgtgaataacttatctacagtatgtgagaaagtttggacattgggactccatcagacattcctgttaatgctaataattggaagatggcttctacccattggaggcgggatcactcgagatcaactctctcaacttcttcttatgtttgtggggacagcggctgacatactggaattcacaagtgagaccctagaagaacaaaatgtgaggaatagtcctgcactagtctatgccatccttgttatatggacttggagcatgctgcagtttccacttgacctggcagtacagaacgttgtgtgccctgtgtctgtgacagagaggggattccccagcctgttcttttgccagtacagtgccgatctgtggaacatcggaatcagcgtcttcatacaagatggccccttccttgtcgtgcgtctcatactgatgacctatttcaaagtgatcaatcagatgctggtgttctttgccgcgaagaacttcctcgtggtggtgttgcaactctaccgcttggtggtgctggcattggcagtccgtgcttcgttgagaagtcagtcagaaggcctgaaaggagaacatggttgccgggcacagacctctgagagtgggccctctcagcgggactggcagaacgagtctaaggagggcctggctattcctttgcggggctccccagtcacctccgacgactcccaccacacccct

SEQ ID NO: 558 - DNA, 255 bp, Homo sapiens
atggctctcaaaccatgtcttgaggccccaattgagtctgggctctgttcagggattgaatgtcatgctgagcacccaacactagttctgatgctctttgccagtgtgctggtgacttgccttgaggctgctaaactcaccgtaggcttccagaccccctggaacatctcccatccattcagcatgcaaaggctgggtgcaggcctccagattgccatggacaaggtcaactcagagctagtggaccttggaaat

SEQ ID NO: 559 - DNA, 390 bp, Homo sapiens
gtgggtcggaagagcgccatcgccgccagtgtatgtggggccctttttatcaggtactgcatctacttttaccacaaaagacgaagtgaccccaatttcaagaacaggcttcgagaacgaagaaagaaacagaagcttcccaaggagagagctgggttttccaagttacctgaccttaaagatgctgacgctgttcagaaattcttccttgaagaaacacagcttggtgaagagttactagctcaaggtaaatatgagaagggtgtagaccatctgacaaatgcaattgctgtgtgtggacagccacagcagttactgcaggtcttacagcaaactcttccaccaccagtgttccagatgcctctgactaagctcccaacaattagagaa

SEQ ID NO: 560 - DNA, 255 bp, Homo sapiens
tggaggtcctggcacttggggttctggaaggcccttgccccactgcaggctgcctgggacgccttctcccagcctgttccagccagctgtggccagctgctgacccagctcctcctgtgtgcctccctggctgctgctgctgcaggtctggtttatcactggctggcatccttgctgctttatcctcctggaccttcagccatggttgccactgtctgtggcctcctggtcttcctgagcctgggcctggtaccc

SEQ ID NO: 561 - DNA, 309 bp, Homo sapiens
gctgcttgctgcaccatgaagtctgccaagctgggatttcttctaagattcttcatcttctgctcattgaataccctgttattgggtggtgttaataaaattgcggagaagatatgtggagacctcaaagatccctgcaaattggacatgaattttggaagctgctatgaagttcactttagatatttctacaacagaacctccaaaagatgtgaaacttttgtcttctccggctgtaatggcaaccttaacaacttcaagcttaaaatagaacgtgaagtagcctgtgttgcaaaatacaaaccaccg

SEQ ID NO: 562 - DNA, 255 bp, Homo sapiens
atggggagccatgagtccctggggccctacttcctggtcttcctgctgctgctgctgcttcctccaccgctttttagagcaggaagccttcggtaccatggacctgactggagaatatttcaccgcctggccctgggctccaggagagcccaccaccaccatggcccaggatggaggcagcactggcgccaggggcaagcaggtcacagatgccagggctcatttgacctctacttcatcttggacaagtctggc

SEQ ID NO: 563 - DNA, 558 bp, Homo sapiens
atgaggcctctgcccagcgggaggaggaagacccgaggcatctccctaggactcttcgccctctgcctggccgcagcccgctgtctgcagagtcagggtgtgtccctatacattcctcaggccaccatcaatgccactgtcaaagaagacatcctgctctcagttgagtactcctgtcatggagtgcccaccatcgaatggacatattcatccaattggggaacgcagaagatcgtggagtggaaaccagggactcaggccaacatctctcaaagccacaaggacagagtctgcacctttgacaacggctccatccagctcttcagcgtgggagtgagggattccggctactatgtcatcaccgtgacggagcgcctggggagcagccagtttggcaccatcgtgctgcacgtctctgagatcctctatgaagacctgcactttgtcgctgtcatccttgcttttctcgctgctgtggccgcagtattaatcagcctcatgtgggtttgtaataagtgtgcatataaatttcagaggaagagaagacacaaactcaaa

SEQ ID NO: 564 - DNA, 630 bp, Homo sapiens
atcttcttgacactcctgtcattcagctatgttgctaaagcactagctggaatttttatgaaaatatcaaccactcaaatagaaaggagatttgagatatcctcttctcttgttggtttaattgatggaagcttcgaaataggttgtgtgaaggaatctgggtcacacatgtggatctatgtcttcatgggtaatatgcttcgtggcataggggaaacccccatagtaccattggggatttcttacattgatgattttgcaaaagaaggacattcttccttgtatttaggtactgtgaatgtaatgggaatgactggtctagtttttgcctttatgctgggatctctgtttgctaaaatgtatgtggatatcggatatgtggatctgagcactatcaggataactcctaaggactctcgttgggttggagcttggtggcttggtttccttgtgtctggaatagtatccattatttcttctataccattctttttcttgcctctaaatccaaataaaccacagaaagaaaggaaagtttcactatttttgcatgtgctaaaaactaatgataaaaggaatcaaatagctaatttgaccaaccgaagaaaatatattaccaaaaatgtgact

SEQ ID NO: 565 - DNA, 342 bp, Homo sapiens
atggctggcactgtgctcggagtcggtgcgggcgtgttcatcttagccctgctctgggtggcagtgctgctgctgtgtgtgctgctgtccagagcctccggggcggcgaggttctctgtcatttttttattcttcggtgctgtgatcatcacatcagttctgttgcttttcccgcgagctggtgaattcccagccccagaagtggaagttaagattgtggatgactttttcattggccgctatgtcctgctggctttccttagtgccatcttccttggaggcctcttcttggttttaatccattatgttctggagccgatctatgccaaaccactgcactcc

SEQ ID NO: 566 - DNA, 870 bp, Homo sapiens
atggaacagcggaaccggctcggtgccctcggatacctgccgcctctgctgctgcatgccctgctgctcttcgtggccgacgctgcattcacagaagtccccaaagatgtgacagtacgggagggagacgacatcgaaatgccctgcgcgttccgggccagcggagccacctcgtattcgctggagattcagtggtggtacctcaaggagccaccccgggagctgctgcacgagctggcgctcagcgtgccgggcgcccggagcaaggtttgggagctgcccagcccggcctctaaccctgctctcttgcagaccgtacgcgtccagggcaatgacatctcacaccggcttcggctgtctgccgtgcggctgcaggacgagggcgtgtacgagtgccgcgtgtcggactacagcgacgacgacacgcaggagcacaaggcccaggcgatgctgcgcgtgctctcgcgcttcgcgccgcccaacatgcaggccgccgaggccgtgtcccacatccagagcagcggcccgcgtcgccacggcccagccagcgccgccaacgccaacaacgcgggcgccgcgagccgtaccacctccgagcccggccgcggcgacaagagcccgccgcccgggagccctcccgccgccatcgatcccgcagtccccgaggccgcggcagcctcggcggcccacacgcccaccaccacagtcgcggcagctgctgctgcctcgtcagcgtcgccgccatcgggacaggcggtcctgctgcgccagaggcacggctcgggcaccggccgtagctacaccacagacccactcttgtccctgctcctgttagctctgcataagttcctgcgcctgctcttgggacat

SEQ ID NO: 567 - DNA, 255 bp, Homo sapiens
atggatccaaccaccccggcctggggaacagaaagtacaacagtgaatggaaatgaccaagcccttcttctgctttgtggcaaggagaccctgatcccggtcttcctgatccttttcattgccctggtcgggctggtaggaaacgggtttgtgctctggctcctgggcttccgcatgcgcaggaacgccttctctgtctacgtcctcagcctggccggggccgacttcctcttcctctgcttccagattataaat

SEQ ID NO: 568 - DNA, 471 bp, Homo sapiens
atggccggcagaaggctgaatctgcgctgggcactgagtgtgctttgtgtgctgctaatggcggagacagtgtctgggactaggggctcgtctacaggagctcacattagcccccagtttccagcttcaggtgtgaaccagacccccgtggtagacgtgagtatcccgtgccgcaaggtgtgtggcctgaatgtctctgaccgctgtgacttcatccggaccaaccctgactgccacagtgatggggggtacctggactacctggaaggcatcttctgccacttccctcccagcctcctccctctggctgtcactctctacgtgaggccctgccctggggggctggtttcctggctgctctacctgtttctgattctgggagtcaccgcagccaagtttgccctggtggccttctctgacccgcacacagccggcctggcccttggggcactgtttggtgagagcagcccc

SEQ ID NO: 569 - DNA, 108 bp, Homo sapiens
atgattcccttgtacccatcattcaatttcaataagtcacattttgcctttcaaattttacctattgccactaacatcctttttttttctggagtagctgaactgatt

SEQ ID NO: 570 - DNA, 534 bp, Homo sapiens
atgcaatctgttggacttttactatctctcctgggatggattttatccattattacaacttatttgccacactggaagaacctcaacctggacttaaatgaaatggaaaactggaccatgggactctggcaaacctgtgtcatccaagaggaagtggggatgcaatgcaaggactttgactccttcctggctttgcctgctgaactcagggtctccaggatcttaatgtttctgtcaaatgggctgggatttctgggcctgctggtctctgggtttggcctggactgtttgagaattggagagagtcagagagatctcaagaggcgactgctcattctgggaggaattctgtcctgggcctcgggaatcacagccctggttcccgtctcttgggttgcccacaagacggttcaggagttctgggatgagaacgtcccagactttgtccccaggtgggagtttggggaggccctgtttctgggctggtttgctggactttctcttctgctaggagggtgtctgctcaactgcgca

SEQ ID NO: 571 - DNA, 165 bp, Homo sapiens
atgatactagctgtgggtttatctgtctgtggcttttattgtgttgaggcatgttccttctacatccagttgagtttttatcatgaagggatgctgaattttactgaatacttttttggcatctatagaaatggacatatggttatgtccttcattcttttgatg

SEQ ID NO: 572 - DNA, 255 bp, Homo sapiens
tgttcccactatagatccaagattcacctaaaagctggagataaacttcaaagccctgaagggaaacccaagactggaaggatccaagagaaatgcgaaggaccttgtatttcttcttccaactgcagccagccctgtgctaaggactttcatggagaaataggatttacatgtaatcaaaaaaagtggcaaaaatcagctgaaacatgtacaagcctttctgtggaaaaactctttaaggactcaactggtgca

SEQ ID NO: 573 - DNA, 255 bp, Homo sapiens
atgctcatcttcttcctggtgtcggtggcgctggagctgctgtgcttcctgctgcacctgttagtgcggtgcagtggcttcgtgctcttctataccacacggccgcgcgacagccgccggggcaggccaggcctgggcaggggctctggctaccgcgtgcaccacgacgtcgtcgccggggacgtccacttccacagaggcactgcccctacggggtccccagcacagacagcccctgccaggaggtgccctatc

SEQ ID NO: 574 - DNA, 255 bp, Homo sapiens
atgaactcgtgggacgcgggcctggcggggctactggtgggcacgatgggcgtctcgctgctgtccaacgcgctggtgctgctctgcctgctgcacagcgcggacatccgccgccaggcgccggcgctcttcaccctgaacctcacgtgcgggaacctgctgtgcaccgtggtcaacatgccgctcacgctggccggcgtcgtggcgcagcggcagccggcgggcgaccgcctgtgccgcctggctgccttcctc

SEQ ID NO: 575 - DNA, 639 bp, Homo sapiens
tcccatggctggacaagccaagctaagttttcagtgtacataaaaagcataaaacctgatgaagtggcctgcctaaaaattaatgtgatggccgcaattgcagcttttgtggccctgatgttagtctttgaacgagtctgccttctggatcaagtgaacttttactctgggattatagaaaacaaaggcacgccttcttcctgccagctgtcctcagagacaagagtctcactcagcttcagctcaggcccgctctctactgagccttccacctggacttccaagtggaaacaccccaaagatcctcatccctttcctccactcgatgcctggtttggctaccacccgtataccaagcttggctacgcaggcaacactgagccccagttcattattccttcatgtattgccatcagagagtcagcaaaggtagttgaccaagcccaaaggagagtgttgaggggagttgatgaccttgactttttcataggagatgaagccatcgataaacctacatatgctacaaagtggccgatacgacatggaatcattgaagactgggatcttatggaaaggttcatggagcaagtggtttttaaatatcttcgagctgaacctgaggaccattattttttaatg

SEQ ID NO: 576 - DNA, 609 bp, Homo sapiens
gtcaacattctccagtttatattcattgccttaagactggacaagatcatccactggccctggcttgttgtgtgtgtcccgctgtggattctcatgtcctttctgtgcctggtggtcctctactacattgtgtggtccgtcttgttcttgcgctctatggatgtgattgcggagcagcgcaggacacacataaccatggccctgagctggatgaccatcgtcgtgccccttcttacatttgagattctgctggttcacaaactggatggccacaacgccttctcctgcatcccgatctttgtccccctttggctctcgttgatcacgctgatggcaaccacatttggacagaagggaggaaaccactggtggtttggtatccgcaaagatttctgtcagtttctgcttgaaatcttcccatttctacgagaatatggaaacatttcctatgatctccatcacgaagataatgaagaaaccgaagagaccccagttccggagccccctaaaatcgcacccatgtttcgaaagaaggccagggtggtcattacccagagccctgggaagtatgtgctcccacctcccaaattaaatatcgaaatgccagat

SEQ ID NO: 577 - DNA, 255 bp, Homo sapiens
ctccttacagggctactttctcatgttttgatggaagtcaagaagataccagtggaagaggggctgtgcactacaatcccttgtgcatttgaatttcccaaagaacccccaagcaattccatgatcatgcactactggctcaacaaaaacatcagctccctggtagctacaaataaacccaatgctaccattggtgataacaccaaggacaaattttacatgactgggaatcttgatgaagaagactgtacccta

SEQ ID NO: 578 - DNA, 690 bp, Homo sapiens
atgtttgtcccacacaaagaaaatgggcacatgctgaaattccttgaagtaaaatttggactaaatatgaccaatggtaagtccctgaaggaaactgttactcttgaagatggacgaattggagaaagaccagaaataatttatcatgtaattcacactattttattgggttctcttgcaatggttatagaaggcttgaagtacatctggattccttatgtgtgcatgttagcagcatttggtgtatgttctcccgaactttggatgacacttttcaagtggcttcgattaagaactgtacacccaatattgttgttttttcccagattaatgacagaattaatggaactacaggaattctatgacccagatacagtggaacttatgacctggataaaaaggcaagctccagttgcagctgtgtttgcagggagtccacagttaatgggtgcgattaaattatgcactggatggatggtgacaagtttgcctctttacaatgatgatgatcttctcaagagaaatgaaaatatctaccaaatctattcaaagcgatctgctgaggatatttataaaatactgacatcttacaaagctaattacctaattgtagaggatgctatctgcaatgaggtgggacccatgagaggctgtagggttaaagatttattagacattgcaaatggccac

SEQ ID NO: 579 - DNA, 474 bp, Homo sapiens
accttttctgctgccatgacaaccatgcaaggaatggaacagaccactccaggggctggccctgatgtgccccagctgggaaacatagatgtcatacattcatatctgtgtaaaggattgcaagagaagttcttcaagaggaaacccaaagtccttggggttgtgcggattctgattgccttgatgagccttagcatgggaataataatgatgtgtgttgcatttagttcttatgaagaacatcccatttttgtgtatgttgcgtacacaatttgggggtcagtgatgtataagtaccagtaccaagagccagctgttggaggtagtctaggaaagaatatcaccagttcagtcttggctatatcagggatcttaatcaatgcaataagcttgacgttttattcattccgttaccattactgtaaccacgatcagttgtcaagtaattgttacatgactatgtccattttaatg

SEQ ID NO: 580 - DNA, 741 bp, Homo sapiens
accaaaaatgtcactaaagcattaaccacctatgttgtgagtgccagcatttcagatgatatgttcattcaaaacttagctgacccagtggttatcactctgcagcatattggaggaaaccagaattatggtcaagttcactgtgccttttgggattttgagaataataatgggctgggtggatggaattcgtcaggctgtaaagtaaaggaaacaaatgtaaattacacaatctgtcagtgtgaccacctcacccattttggagtcttaatggatttatccaggtctacagtggattcagtgaatgaacagatattagcgcttataacatacaccggatgtggaatctcctccatttttctgggagttgcagtggtgacatacatagcttttcacaaacttcgaaaagattatcctgccaaaattctgatcaacctgtgcacagcactactgatgctaaacctggtatttttgatcaattcttggttgtcatcatttcagaaagtgggagtttgtatcacagctgcagtggcacttcattacttcctgcttgtttcttttacttggatgggcctggaggcagtccacatgtatttggctctagtcaaagtcttcaacatatacattccaaattatatccttaaattttgtctagttggttggggaatcccggctatcatggtggcaatcacagtcagtgtgaaaaaagatctgtatggaactctgagcccaacaactccg

SEQ ID NO: 581 - DNA, 639 bp, Homo sapiens
ctgccctcgcaggaggcctccaagctctaccacgagcactacatgcggaactcgcgggccatcggcgtgctgtgggccatcttcaccatctgcttcgccatcatcaacgtggtggtcttcatccagccctactgggtgggcgacagcgtgagcacccccaagcctggctacttcggcctcttccactactgcgtgggcagcgggctggcgggccgcgagctcacctgccggggctccttcaccgacttcagcaccatcccgtccagcgccttcaaggcggccgccttcttcgtgctgctctccatggtgctgatcctcggctgcatcacctgcttttcgcttttcttcttctgcaacacggctacggtctacaagatctgcgcctggatgcagctcttggcagctctgtgcctcgtcctgggctgcatgatctttcctgatggctgggatgccgagaccatccgggacatgtgtggggccaagacggggaagtactccctgggggactgttcagtgcgctgggcatacatcctggccatcatcggcatcctcaacgccctcatcctctccttcctcgccttcgtgctgggcaaccggcaaacagacctgctgcaggaggagctcaagccggagaacaaa

SEQ ID NO: 582 - DNA, 510 bp, Homo sapiens
ggagagaatggctacactgctgctgaatccaaagcccaccctggaggggaagcaggcggcggccacctctgctgctcacgtcgcggggcctgcctctctgcctctctgctgctcctcctggcaactgtggcggccctcatcgccttggtcaccattcttggactcccatcatgcaccccaggagcccaagcttgtataacactgacaaacaggacaggcttcttgtgccatgaccagaggagctgcattccagccagtggggtctgtgatggcgttcgcacctgtacccacggcgaggacgaggatgagagcttgtgccgagatgtgccccagagcctcccccacttccttgtggcccactgtggagacccggcctcctggatctactcagaccaaaaatgtgatggcactaacaactgcggggactgttcagatgaactgagcccaggtaggggtctgggcacaggctgggctggggctggtgtccaggcagcagccagagggcaaagg

SEQ ID NO: 583 - DNA, 255 bp, Homo sapiens
tgggtaggcggggaagcagctggagtgcgaccgccgcggcagccaccctgcaaccgccagtcggaggtgcagtccgtaggccctggcccccgggtgggcccttggggagtcggcgccgctcccggggagctgcaaggctcgcccctgcccggcgtggagggcgcggggggcgcggaggatattcttggtgatcttggaagtgtccgtatcatggaatcaatctctatgatgggaagccctaagagccttagtgaa

SEQ ID NO: 584 - DNA, 255 bp, Homo sapiens
atggtgtctaaagatgcttcagtaaaagaatacatctttaaagaactgcagaaatatcttccaagtcatgcagtcccggatgagcttgtattgatcgactctctaccatttacatcccacggcaaaattgatgtttctgagttaaacaagatatatttaaactacataaacttgaagtctgagaataagctcagtgggaaagaggacctttgggaaaaattacagtatttgtggaagtctactctgaatctccca

SEQ ID NO: 585 - DNA, 303 bp, Homo sapiens
atggaaggctgcctccgaatcgaggaagccttgaccttgggaggggcctgccttttcgctgggcttgcctttctctgggcagcgttcgctcagcacttcagtgcggccgattcccctgggactgaattcacaccagccacgacgacttcccggctacttcacgttctctatgtttgcagctgttctttggtggcagaaaaagatgatttttcttccccccactcccattcccttttgttagtttctctccctgaaccacattttgagctgagtgaaggtctcaggttggcctttagagggagt

SEQ ID NO: 586 - DNA, 255 bp, Homo sapiens
atggcctgtgaaccacaggtggacccgggggccactggcccattgcccccctcctcccctggctggagtgccctgcctggagggagccctcctggctgggggcaagacctcctggctgctgaccagtggctcacagggccttgtactgtggtgcaaggagatctcgatccttttgtccagtttctctacttggaactgcaggcagagctccacaatggccaggtcctcactgttctccggattgacaatacctgt

SEQ ID NO: 587 - DNA, 255 bp, Homo sapiens
atggagggtgtagggggtctctggccttgggtgctgggtctgctctccttgccaggtgtgatcctaggagcgcccctggcctccagctgcgcaggagcctgtggtaccagcttcccagatggcctcacccctgagggaacccaggcctccggggacaaggacattcctgcaattaaccaagggctcatcctggaagaaaccccagagagcagcttcctcatcgagggggacatcatccggccgagtcccttccga

SEQ ID NO: 588 - DNA, 228 bp, Homo sapiens
gttctacatgaaacattttctcaacacacattcctcatgaatggtctcattcaaggtgtaaagggcctgctctcttttttgagtgccccactcattggtgccctgtctgatgtgtgggggaggaagccctttctcctcggcactgtattctttacctgcttcccaatcccactgatgaggatcagcccatgccgagcgtggtggtgtgcgcttgtaatctcagctacc

SEQ ID NO: 589 - DNA, 255 bp, Homo sapiens
atgagtgatgagcggcggctgcctggcagtgcagtgggctggctggtatgtgggggcctctccctgctggccaatgcctggggcatcctcagcgttggcgccaagcagaagaagtggaagcccttggagttcctgctgtgtacactcgcggccacccacatgctaaatgtggccgtgcccatcgccacctactccgtggtgcagctgcggcggcagcgccccgacttcgagtggaatgagggtctctgcaaggtc

SEQ ID NO: 590 - DNA, 255 bp, Homo sapiens
atggagcaagtcaataagactgtggtgagagagttcgtcgtcctcggcttctcatccctggccaggctgcagcagctgctctttgttatcttcctgctcctctacctgttcactctgggcaccaatgcaatcatcatttccaccattgtgctggacagagcccttcatactcccatgtacttcttccttgccatcctttcttgctctgagatttgctatacctttgtcattgtacccaagatgctggttgacctg

SEQ ID NO: 591 - DNA, 903 bp, Homo sapiens
agaatgaagagaaagaacttcacagaagtgtcagaattcattttcttgggattttctagctttggaaagcatcagataaccctctttgtggttttcctaactgtctacattttaactctggttgctaacatcatcattgtgactatcatctgcattgaccatcatctccacactcccatgtatttcttcctaagcatgctggctagttcagagacggtgtacacactggtcattgtgccacgaatgcttttgagcctcatttttcataaccaacctatctccttggcaggctgtgctacacaaatgttcttttttgttatcttggccactaataattgcttcctgcttactgcaatggggtatgaccgctatgtggccatctgcagacccctgagatacactgtcatcatgagcaagggactatgtgcccagctggtgtgtgggtcctttggcattggtctgactatggcagttctccatgtgacagccatgttcaatttgccgttctgtggcacagtggtagaccacttcttttgtgacatttacccagtcatgaaactttcttgcattgataccactatcaatgagataataaattatggtgtaagttcatttgtgatttttgtgcccataggcctgatatttatctcctatgtccttgtcatctcttccatccttcaaattgcctcagctgagggccggaagaagacctttgccacctgtgtctcccacctcactgtggttattgtccactgtggctgtgcctccattgcctacctcaagccgaagtcagaaagttcaatagaaaaagaccttgttctctcagtgacgtacaccatcatcactcccttgctgaaccctgttgtttacagtctgagaaacaaggaggtaaaggatgcccta

SEQ ID NO: 592 - DNA, 501 bp, Homo sapiens
atggagaccattatggatgatgaggtgacaaagagattctcagcagaagaactggagtcctggaacctgctgagcagaaccaattataacttccagtacatcagccttcggctcacggtcctgtgggggttaggagtgctgattcggtactgctttctgctgccgctcaggatagcactggctttcacagggattagccttctggtggtgggcacaactgtggtgggatacttgccaaatgggaggtttaaggagttcatgagtaaacatgttcacttaatgtgttaccggatctgcgtgcgagcgctgacagccatcatcacctaccatgacagggaaaacagaccaagaaatggtggcatctgtgtggccaatcatacctcaccgatcgatgtgatcatcttggccagcgatggctattatgccatggtgggtcaagtgcacgggggactcatgggtgtgattcagagagccatggtgaaggcctgcccacacgtctgg

SEQ ID NO: 593 - DNA, 255 bp, Homo sapiens
atgtcccagacaggctcgcatcccgggaggggcttggcagggcgctggctgtggggagcccaaccctgcctcctgctccccattgtgccgctctcctggctggtgtggctgcttctgctactgctggcctctctcctgccctcagcccggctggccagccccctcccccgggaggaggagatcgtgtttccagagaagctcaacggcagcgtcctgcctggctcgggcgcccctgccaggctgttgtgccgcttg

SEQ ID NO: 594 - DNA, 255 bp, Homo sapiens
atgcgccccccgcccgcgctggccctggccgggctctgcctgctggcgctgcccgccgccgccgcctcctacttcggcctgaccgggcgggaagtcctgacgcccttcccaggattgggcactgcggcagccccggcacagggcggggcccacctgaagcagtgtgacctgctgaagctgtcccggcggcagaagcagctctgccggagggagcccggcctggctgagaccctgagggatgctgcgcacctcggc

SEQ ID NO: 595 - DNA, 831 bp, Homo sapiens
gtggccatggcagcactggtgtggctgctggcgggagccagcatgtcaagcctcaacaagtggatcttcacagtgcacggctttgggcggcccctgctgctgtcggccctgcacatgctggtggcagccctggcatgccaccggggggcacggcgccccatgccaggcggcactcgctgccgagtcctactgctcagtctcacctttggcacgtccatggcctgcggcaacgtgggcctaagggctgtgcccctggacctggcacaactggttactaccaccacacctctgttcaccctggccctgtcggcgctgctgctgggccgccgccaccacccacttcagttggccgccatgggtccgctctgcctgggggccgcctgcagcctggctggagagttccggacaccccctaccggctgtggcttcctgctcgcagccacctgcctccgcggactcaagtcggttcagcaaagtgccctgctgcaggaggagaggctggacgcggtgaccctgctttacgccacctcgctgcccagcttctgcctgctggcgggtgcagccctggtgctggaggctggcgttgccccaccgcccactgctggcgactctcgcctctgggcctgcatcctgctcagctgcctcctgtctgttctctataacctggccagcttctccctgctggccctcacctctgccctcaccgtccacgtcctgggcaacctcaccgtggtgggcaacctcatcctgtcccggctgttgtttggcagccgcctcagtgccctcagctacgtgggcatcgcactcactctttcaggaatgttcctttac

SEQ ID NO: 596 - DNA, 255 bp, Homo sapiens
ttgtcttcttcagccagtctgctggcctgtgggatctgccaggcctctggccaaatcttcatcacccaaaccctggggatcaagggatatcggactgtcgtggccctggataaggtccctgaggatgttcaggaatacagctggtactggggtgcaaacgacagcgcaggaaacatgattatcagccacaaaccgcccagtgcccagcagcctgggcccatgtacactggcagggagagagtgaacagagaaggc

SEQ ID NO: 597 - DNA, 255 bp, Homo sapiens
cccctaccccagctgtcggttcagcccaaggctccagagacagaggagggggcggccgagctccggctgcgctgcctggggtgggggccaggtcgcggggagctgagctggagccgggacggacgcgccctggaggcggcggaatcggagggagccgagacgccccggatgcgctcagagggcgaccagctgctcatcgtgcgccctgtgcgcagcgaccacgcccggtacacttgccgcgtccgcagccccttc

SEQ ID NO: 598 - DNA, 255 bp, Homo sapiens
agttctggccagaagttctcccaagatgacttccccttaggccctgtgagcatctcccatgggggccagtacagatgttcagtggacacaacctctcctctaggtggtcagcccccagtgacccccctggacatcctgatcgcaggattctacagcaaacccaccctctcagccctgcccagccctgtggtggcctcaggggggaaagtgaccctccgatgtggctcacagaagggatatcaccattttgttctg

SEQ ID NO: 599 - DNA, 255 bp, Homo sapiens
ttgaaagttgagagcagcatgttttgcccactgaaactcatcctgctgccagtgttactggattattccttgggcctgaatgacttgaatgtttccccgcctgagctaacagtccatgtgggtgattcagctctgatgggatgtgttttccagagcacagaagacaaatgtatattcaagatagactggactctgtcaccaggagagcacgccaaggacgaatatgtgctatactattactccaatctcagtgtg

SEQ ID NO: 600 - DNA, 792 bp, Homo sapiens
atggtcttcactcaggccccggctgaaatcatgggccacctccggatacgcagcctcctggcccggcagtgcctggcagagtttctgggtgtgtttgtactcatgctcctcacccaaggagctgtggcccaggctgtcaccagtggagaaaccaaaggcaacttcttcaccatgtttctggctggctctctggccgttacgatagccatctacgtgggtggtaacgtctcaggggcccacctgaatccagccttctccctggccatgtgcatcgttggacgcctcccctgggtcaagctccccatttacatcttggtgcagttgctgtctgctttctgtgcttcgggagccacctatgttctctaccatgatgccctacagaactatacaggtgggaacctgacagtgactggccccaaggagacagcctccatttttgccacctatcctgccccctatctgtccctgaacaatggcttcctggatcaggttctgggcactgggatgctgattgtggggctcttggccatcctggacagacggaacaagggagtccctgcgggtctggagcctgtggtggtggggatgctgatcctggccctcgggttatccatgggtgccaactgcgggattccactcaaccctgcccgggacctgggcccacgtctcttcacctacgtggctggctggggtcctgaagtcttcaggtgggagacagactctcctggtgctggcctccactcaccttcctctgctaagggctctgtccctgggtccacagcactctgcctt

SEQ ID NO: 601 - DNA, 255 bp, Homo sapiens
atggctccccgaaccctcctcctgctgctcttgggggccctggccctgaccgagacctgggccggctcccactccttgaggtatttcagcaccgcagtgtcccagcccggccgcggggagccccggttcatcgccgtgggctacgtggacgacacagagttcgtgcggttcgacagcgactccgtgagtccgaggatggagcggcgggcgccgtgggtggagcaggaggggctggagtattgggaccaggagaca

SEQ ID NO: 602 - DNA, 255 bp, Homo sapiens
atggcgaccgaccttcccatcatggcgcgtggccccgcccgctccgccgcgcctgcgggagggagcagttccgggtgcggtgcgcgccaggggcgggcggggggcggcgtcctggccatggccggcctgtcggacctggaactgcggcgggagctgcaggccctgggcttccagccaggacccatcaccgacaccacccgggatgtctaccgcaacaagctgcgccgcctgcggggcgaggcccggctgcgcgac

SEQ ID NO: 603 - DNA, 255 bp, Homo sapiens
tgtgcctacgtcatcatcctcatggccatttactggtgcacagaagtcatccctctggctgtcacctctctcatgcctgtcttgcttttcccactcttccagattctggactccaggcaggtgtgtgtccagtacatgaaggacaccaacatgctgttcctgggcggcctcatcgtggccgtggctgtggagcgctggaacctgcacaagaggatcgccctgcgcacgctcctctgggtgggggccaagcctgca

SEQ ID NO: 604 - DNA, 780 bp, Homo sapiens
caggtgaggctgcagacccagaccacctaccggggcatcgttgattgcatggtcaagatttaccgccatgagtccctcctgggcttcttcaagggaatgagcttccccattgccagcatagctgtggtcaactctgtcctgtttggggtctatagcaacaccctgctggtgctcacggccacctcccaccaggagcggcgggcccagccgcccagctacatgcacatcttcctagcgggctgcaccggggggttcctgcaggcctactgtctggctccttttgacctcatcaaagtccggctacaaaaccagacagagccaagggcccagccagggagccccccaccccggtaccaggggcccgtgcactgtgcagcctccatcttccgggaggaggggccccgggggctgttccgaggagcctgggccctgacgctgagggacacccccacggtggggatctacttcatcacctatgaagggctctgtcgccagtacacaccagaaggccagaatcccagctcagccacggtgctggtggcagggggctttgcaggcattgcttcctgggtggcagccacgcccttagacgtgatcaagtcccggatgcagatggatggactgagacgcagagtgtaccaggggatgctggactgcatggtgagcagcatccggcaggaaggactgggagtcttcttccggggggtcaccatcaacagtgcccgcgcctttcccgtcaatgctgtcaccttcctcagctacgaatatctcctccgctgg

SEQ ID NO: 605 - DNA, 651 bp, Homo sapiens
tggaaacagaccagtgttagggatgaccgggggattcctggccctctcttgaccctcacggtccagtgggaagtaattggggttccagccggggcggcatctccatgtggctgttccggacccttaaaagcacagctgggcttgctgaaagcagcgccccctgaccaggcaccaccagggcaaggcgagggaagaaagaaggactccgcccttctaagtaaaaggcggaaatgtgggaagtatggcatcacgagcctgctggccaatggtgtgtacgcggctgcatacccactgcacgatggagactacaacggtgaaaacgtcgagttcaacgacagaaaactcctgtacgaagagtgggcacgctatggagttttctataagtaccagcccatcgacctggtcaggaagtattttggggagaagatcggcctgtacttcgcctggctgggcgtgtacacccagatgctcatccctgcctccatcgtgggaatcattgtcttcctgtacggatgcgccaccatggatgaaaacatccccagtagttgggatctggccccaggctcacctgtgctcagcaaagcagaagcctgcactgagcgggacccatcatccctggcaggcccccccggcttcccgagtgagcctaca

SEQ ID NO: 606 - DNA, 618 bp, Homo sapiens
atggagagggtggcagaagcctacgggaaggggtcacagggatcagctagagagtgccaccacccttcctggggaatgcagggcaaggtccctggtgggagttttcctgggaagccaaagaagcgcccaacaaagacagaatcaacatttgggtacctttggtacccagaggcagcaatgccaactacaaccacactggaagaagaagaccttctccgcatagattctctgatctcttcctccttcatggcaccagccctggggaaccagcatggtggggaaataatgaagctggaatacaaccacttacagacttcacaacctcctcctgtagataccaaagggattttaggatcacattttatttctcacctgagcaagaaaagctacaggagcatctcaagcagagggcaggagtctccagaggagttcaaggggctctggcaagaaaaatcaaggggctgtgttcaagaactggctcccttggtgattgtattacgaagcccatgtgtgctggatgctgatgaaattgctgccaaatgcctgtgcagccttggcaaggccctttatttctctgggtctccatttctctctctcttttttttttttttttttttt

SEQ ID NO: 607 - DNA, 540 bp, Homo sapiens
agtaccattcacgagtcctacggtcggccagaggagcaagtgctcatcaaccgccaggaaatcacgaacaaagcggacgcctgggacatgcaggagttcatcactcacatgtacatcaagcagctgctccgacaccccgccttccaactgctgctggccctgctgctggtgatcaatgccatcaccatcgctctccgtaccaactcctacctggaccagaaacactatgagttgttctctaccatagatgacattgtgctgaccatccttctttgtgaggttctccttggctggctcaatggcttctggattttctggaaggacggctggaacatcctcaacttcattatcgtctttatcttgctcttgcggttcttcattaatgaaatcaatattccctccatcaactacactctcagggcgcttcgtctggtgcatgtgtgcatggcggtggagcccctcgcccggatcatccgcgtcatcctgcagtcggtgcctgacatggccaatatcatggtcctcatcctcttcttcatgctg

SEQ ID NO: 608 - DNA, 255 bp, Homo sapiens
atgggagccgtggtccacctgttcagctccgccctgctggacccaggcctgatcggggcccttggagtcttggtcctgaacagcctcctgaaagtttacttcttcgtgggctgtgccaatgacccgcagcggcgacccgaaaaggagcggcttcgggcccagtgggcctccctggaaacggtgcacctggcagggctggccctgtttctgacggtcgtggggtcccgggtggctgccctcgtggtgctcgagttc

SEQ ID NO: 609 - DNA, 255 bp, Homo sapiens
gccgtcccgcgccagggctcgctccgagagccgcttccttctcgccgcggccggcgcgggccccccggccatgcgcccccgagccccagcctgcgccgccgcggcgctcgggctctgcagccttctgctgctgctcgcgcccgggcacgcgtgccccgcgggctgcgcctgcaccgacccgcacaccgtggactgccgcgagggctgcccagcgtgccagaccctttccccctggacgtgcgcaagctgctggtg

SEQ ID NO: 610 - DNA, 528 bp, Homo sapiens
ccctcaggacctctttttgccttcactcctctgactcagtttcctgcttacgggatctcctgtggtgtagacctgaatcctcaaagagccagaatcttccatgccttggagagaatgaagacccaggatggctggtggcccaacttgctgaaagtgaagaagaagtggctcctcccggccatctgcagcttcttctgcctgctctcagtggtcatgactggctgcttcctgtggcagtatcacctccccaagctgaagaccggttccctgggaccagaggagacctctgcccctgtgaggatgtgtccccggcaccctgagcccgtgcccctggctcacccactccccgtgttgaaggaggccctggaaaaggtggaccagatcctgcgccaggcaatgtctgccccaggcgtggctgccatgtctgcagttgtcatccacaatgatactgtgctctggacagggaactttgggaagaagaatggctcagacccggcttctggggcccccaatgagtacaccatgtac

SEQ ID NO: 611 - DNA, 255 bp, Homo sapiens
cattttctcttgccaccactaagtaagaagagccttttgcctcccaccatgattctgaggccttaccagccatgtggaactgttaaagaatttgacaccaattttacatatgtgcaacagtcagaattctacttggagccaaacattaagtacgtatttcaagtgagatgtcaagaaacaggcaaaaggtactggcagccttggagttcactgttttttcataaaacacctgaaacagttccccaggtcacatca

SEQ ID NO: 612 - DNA, 255 bp, Homo sapiens
atgttgcggttggtggcagcttgccctgagtcatgtgtggtgtgcaccaaagatgtaaccctctgtcaccagctaacctatatagtagcagcccctatgaccacgagggttttaatcatcaccgatggatatctctcctctattgagagcacaaacctgtctctcttgtttaatcttgccctgctctccctaagcagaaatggtatcgaggatgttcaggaagatgccctgcatgggcttacgatgttgcggacc

SEQ ID NO: 613 - DNA, 255 bp, Homo sapiens
cagtgtctgggccctcagctccccctccctccacctaccccctcacacccaccactacgaccccacgggatacccagcccagacggaggaaacaccgagcctagagacatgagagttggaggagcattccaccttctactcgtgtgcctgagcccagcactgctgtctgctgtgcggatcaacggggatggacaggaggtcctgtacctggcagaaggtgataatgtgaggctgggctgcccctacgtcctggac

SEQ ID NO: 614 - DNA, 255 bp, Homo sapiens
gaggaggacgccctgctggagaacgggagccagagcaacgaaagtgacgacgtcagcacagaccgtggccctgcgccaccttccccgctcaaggagacctccttttccatcgggctgcaagtactgtttccattcctcctggcaggctttgggaccgtggctgctggcatggtgttggacatcgtgcagcactgggaagtcttccagaaggtgacagaggtcttcatcctagtgcctgcgctgctggggctcaaa

SEQ ID NO: 615 - DNA, 255 bp, Homo sapiens
atgttgtgtcaccgtggtggccagctgatagtgccaatcatcccactttgccctgagcactcctgcaggggtagaagactccagaaccttctctcaggcccatggcccaagcagcccatggaacttcataacctgagctctccatctccctctctctcctcctctgttctccctccctccttctctccctcaccctcctctgctccctctgcctttaccactgtgggggggtcctctggagggccctgccacccc

SEQ ID NO: 616 - DNA, 255 bp, Homo sapiens
aggagcggggccgggagctgcgaggagccctccagacgtcgccgagcgcgagggcgggcgtgctcggagtggtcgctcgtcagccgccgcccctcagtctccgcacttgcaggtcccctccctctccgccgggacgcgggagagcccggctcgcggcgggggcggccaatgcgaaactggctggtgctgctgtgcccgtgtgtgctcggggccgcgctgcacctctggctgcggctgcgctccccgccgcccgcc

SEQ ID NO: 617 - DNA, 735 bp, Homo sapiens
atgaccctggtcatcctcctcgtggagctgggcggctcccaggcccgcttccccttgttttggcgcaacttccccatcacctttgcctgctatgcggccctcttgtgcctctcggcctccatcatctaccccaccacctacttgcagttcctgtcccacggccgttcccgcgaccacgccatcgccgccatcgtcttctctggcatcgcctgtgtggcttacgccaccgaagtaacctggacccgggcccggcccggcgagatcactgactacatggcctccgagctggggctgctgaaggtgctggagaccttcgtggcctgcctcatcttcgtgttcatcaatagcccctacgtgtaccacaaccggccggccctggagtggtgggtggcggtgtacgccctctgcttcgtcctggcggccctcactatcctgctgagcctggggcactgcaccaacatgctgcccatccgcttccccagtttcctgttggggctggccttgctgtccgtcctcctctatgccactgcccttgtcctctggcccctctaccagttcaacgagaagtatggtgtccagccctggcagacgagagatgtgagctgcagcgacagaaacccctaccttgtgtgtatctgggaccgccgactggctgtgaccaacctgacggccgtcaacttgctggcctatgtgggcgacctggtgtactctgcccacctggtttttgtcaaggtc

SEQ ID NO: 618 - DNA, 516 bp, Homo sapiens
ccttccaccaccatcatttccaaaatcaccgtcactatctccaccaccatcacctttaccaccatcaccactatcatcctcatccttcccatcaccatctccactgctatctctcaacaccatcatcatcaccaccaccaccatcatcaccatgagcaccacctctgtcgtcatcaaaaaagcacacaggtagaatacagtgtctttgctgaaagggaaaacgacctgggattgaacggcaccggggatgaagcattgcacgataacggcacaaccgagcgcgtcagcggcccgcccgccggctatttataccgcgcggattatgcaatcgggctccagccattcatgccccgactgggccgccgcacgcccggggcgggggggcctcattcccgggcgccggagctggcctacctgcagaaattaatcacctcacctgccaccttgccatttgtgtaccttgaaactggagggtggagcccaagagatgcccacagggtggataattttgacatg

SEQ ID NO: 619 - DNA, 255 bp, Homo sapiens
acagtatttcccagtccaagttctgatttggaaatccccggaacatatactttcaatggcagtcaagtgctcgcacgaattcttggcttggaaaagctgttaaagcaaaattcaacttcagaagatatacgaagagaactatgtgacagctattcaggatacattgtggatgatgccttctcttggacctttctaggaagaaatgtttttaacaaattttgcctttctaacatgacccttttagagtcttctctc

SEQ ID NO: 620 - DNA, 489 bp, Homo sapiens
catgatcactatctcaatattaatgagcaaggaacatgcatattaaactcatgtctagtccaggatgatactgacatccaaattgttgaatatggtggcagaggtcatgacaacaggagcctctgcacagtagttagtcaggaaaccagtgaattgaaaatgagactaaatatcgctatcttctttggagctctctttggtgctttgggggtgttactctttttggtggcttttggatcggattattggcttcttgcaactgaagtggggagatgttcaggtgaaaagaatatagagaacgtcacttttcaccatgaagggttcttctggaggtgttggtttaatgggattgtggaagagaatgactccaatatttggaagttctggtacaccaatcagccaccgtccaagaactgcacacatgcttacctgtctccgtaccccttcatgagaggcgagcacaactcgacctcctatgactctgcagtt

SEQ ID NO: 621 - DNA, 369 bp, Homo sapiens
atgttacaagattattgtgaacaagttaaagtacttagttcaaagaagaggctcaatgaatattctatattgcattttcttccctgcctcttgcttctctctttcctttcttccctttctcctttcctcttttcttcttttgctctctgccttgtccctaacataaagaacagaaaggagctaatctccctcccttctccactccagactagtcattatacagcctgctttttgctaatctcttgcctcctttctctgaaccggcagtaccaaccttcacgttctaataatctgtcccgatgtcaaggccctggctctgtcattaaagtgggtgagttcaggaagcaacatacatcactttctgagtca

SEQ ID NO: 622 - DNA, 384 bp, Homo sapiens
atggcactttacttctgctcggggctgctgcaggacctggcacagttcgggcactatgcgctcatcatgcccctgtacacacacttcacccacagctatagggagcgactagacatggcgcccgataccctgcagaagcaggcagaccactgcaacgacggccgcatggcgtccaagcacatgaaggaactcagcaccggtctcttctttgccattctggtcaaggagagtggccccctggagtcagaagccatggtgatgggcgtcctgaagcaagccttcgacgtgctggtgctgcgctatggcgtgcagaagcgcatctactgcaacgtcatcaccatcttcagcctggtggaggtggtcctgtgggcagccatggccctc

SEQ ID NO: 623 - DNA, 255 bp, Homo sapiens
aaatacagtctttatgtgggcttggtactggcagtaagctcaagtatttttattggctccagcttcatactgaaaaagaagggcctcttgcaactggccagcaagggctttactagagctggacaaggtggacattcttacctgaaggaatggctctggtgggtaggattgctgtcaatgggagcaggagaggctgcaaattttgctgcttatgcttttgcacctgccaccttggtcacccctctgggtgctttg

SEQ ID NO: 624 - DNA, 573 bp, Homo sapiens
gcctgcacagtacaaaatgaaagcatctcagagttaaccatgtctccaactgctccagaaaaaatggaaagtaatagcaccttcacaagttttgagaacactacagtctggttcttgggaacaatcaactgtatcactgtggctcttgtgttctctaaaggaaaaccatttagacagccaacttatacaaactatatatttgtccttgtgctgataatacagcttggtgtatgtctattcattctatttgctgatataccagaattatatagacgtttggatctgctctgcactcccgtcctgtggagggcctccattgtcatcatgctcagcttgaatttcattgtgtcccttgtggccgaggaggctgttattgaaaatcgagccctgtggatgatgattaaaagatgtttcggctatcagtcaaaaagccagtatcggatatggcagagggacttggcaaatgaccctagttggcccccgctaaaccaaacctcccactctgacatgccggagtgtggcagaggagtgtcttacagcaatccagtatttgagagcaatgaagaacaactc

SEQ ID NO: 625 - DNA, 585 bp, Homo sapiens
agattagtgtgtgggcccaacgccattgaggttgaaatccaacccatatggaagctgcttgttaaacaggttttaaatccattctatgtgttccaagccttcaccctaactttgtggctgtctcaaggttacatagaatactctgtggccatcatcattttgactgttatctccattgtcttaagtgtgtatgatttgcgacagcaatcagttaagctgcataacctcgtggaggaccacaacaaagtccaggttacaatcattgtaaaagacaaaggtttggaggagctggaatcccgtctcttggttcccggagacattcttattcttccaggaaaattttcattgccatgtgatgctgttttgattgatggaagctgcgtggtgaatgaaggcatgcttacagggcagcagatcctggtgctgttcgcgctgtttccacaaccttgttgcatgttcccgtgttctactgtggtgcacacctcttctctcagggacacaccacatctaagtcccgttggattctcttccaactcccagtacgaggactttgatttagctagaaatgcagtagaggaaaggcat

SEQ ID NO: 626 - DNA, 411 bp, Homo sapiens
tcctccaggatgagagtctgtgctaagtcagtgttgctgtcgcactggctctttctagcctacgtgttaatggtgtgctgtaagctgatgtccgcctcaagccagcacctccggggacatgcaggtcaccaccaaatcaagcaagggacctgtgaggtggtcgccgtgcacaggtgctgcaataagaaccgcatagaagagcggtcacaaacggtcaagtgctcttgcttcccgggacaggtggcgggcacaactcgggctcaaccttcttgtgttgaagcttccattgtgattcagaaatggtggtgtcacatgaatccgtgtttggaaggagaggattgtaaagtgctgccagattactcaggttggtcctgtagcagtggcaataaagtcaaaactacgaaggcaagt

SEQ ID NO: 627 - DNA, 528 bp, Homo sapiens
aacaacttcagcacagaaataaacaccacttccattttagtaggacctcttgtttccaatctggaaataacccatacctcaaacctcacctgtgtaaaatttagtaatactatagacacgaccaaatcccaatgcatcaggtgggtaactcctcccacacgaatagtctgcctacccttaggaatattttttgtctttggtagcttagcctatcgttgtctgaatggcttttcagaacctatgtgcttcctctcattcttagtgccccctatgaccatttacactgaacaatatttatacaattatgtcatacctaagccccacaacaaaacagtactcattcttccttttgttatcagagcaggagtgctaggtgggctaagtactggcattggcggtatcacaacctctactcagttctactacaaactatctcaagaactaaagggtgacatggaacaggtcaccgactccctggtcaccttgcaagatcaacttaattccctagcagcggtagtccttcaaaat

SEQ ID NO: 628 - DNA, 255 bp, Homo sapiens
ctccatactcagagtgctccctttggactgtgtcccaaggacatgatgctcacccaggctccaagctccgtcgtgaggtccaggaacagcaggaaccacaccgtgaactctggtggatcctgcctgagtgccagcacagtggccatccctgccatcaacgacagcagtgcagccatgagtgcctgcagcaccatcagcgcccagcccgcaagctccatggacactcagatgcactccccaaagaagcaggagaga

SEQ ID NO: 629 - DNA, 255 bp, Homo sapiens
atgctctgcccttggagaactgctaacctagggctactgttgattttgactatcttcttagtggccgaagcggagggtgctgctcaaccaaacaactcattaatgctgcaaactagcaaggagaatcatgctttagcttcaagcagtttatgtatggatgaaaaacagattacacagaactactcgaaagtactcgcagaagttaacacttcatggcctgtaaagatggctacaaatgctgtgctttgttgccct

SEQ ID NO: 630 - DNA, 255 bp, Homo sapiens
tgggcgtctgcggagagggagcggccgagcggagcccgggtcccggagactcctgccgtcacgcccggggctccgcgtagcagagatcgggagacgcgtctgtgcctccggggaagccgacccatctcccctccgcctctttggctgcagttgcacctccggccagagggcaggcgttggaggttaagcagagagagagaggcgtggacctatttacgagatgtgcaaatcatgacacagaagggcagtatgaag

SEQ ID NO: 631 - DNA, 849 bp, Homo sapiens
ctgctgcgctgggacgaggtgcccgacgacttcgtggagtgcttcatcctgtcgggctaccggcgtctgccgtgcacggcccaggagtgcctagcctcggtgctgaagcctaccaacgagacgctcaacttctggacgcacttcatcccgctgctgctgttcctgagcaagttctgccgtctgttcttcctgagcggcggcgacgtgcccttccaccacccgtggctgctaccgttgtggtgctacgcgtcgggagtgctgctgaccttcgccatgagctgcacggcgcacgtgttcagctgcctgtcgctgcgtctgcgcgccgccttcttctacctggactacgcgtccatcagctactacggcttcggcagcacggtggcctactactactacctgttgccaggcctcagcttgctggatgccagagtcatgactccatacttgcagcagcgcctgggctggcacgtggactgcacgcgccttatcgccgcctaccgcgccctggtgctgcctgtggccttcgtgctggcggtggcttgcactgtggcctgctgcaagagccgtaccgactggtgtacctacccgttcgcgctgcgcaccttcgtcttcgtcatgccgctcagcatggcctgccccattatgctcgagagctggctcttcgacctgcgtggggagaaccccacactcttcgtgcacttctaccgccgctacttctggctggtggtggccgccttcttcaacgtgagcaagatccccgagcgcatccagccgggtcttttcgacattatcggccacagccaccagctcttccacatcttcaccttcctcagcatctacgaccaggtg

SEQ ID NO: 632 - DNA, 210 bp, Homo sapiens
ttggcaaaacctcagatgtgtggtcttctggccaaatgtctgcaatttcatattgttggagcctttattgtatccctgggggttgcagctgtctgtaagattgctgtggctgaaccaagaaagaagacatatgcagatttctacagaaattatgattccgtgaaagatttggaggagatggggaaggctggtatctttcagaatacaaag

SEQ ID NO: 633 - DNA, 558 bp, Homo sapiens
ctaggtcttgatgcagaactttattatgtgagaaatgaccttattagtcactacgctctatcctttagtctgttagtacccagtgagacaaatttcctgcacttcacctggcatgcgaagtccaaggttgaatataagctgggattccaagtggacaatgttttggcaatggatatgccccaggtcaacatttctgttcagggggaagttccacgcactttatcagtgtttcgggtagagctttcctgtactggcaaagtagattctgaagttatgatactaatgcagctcaacttgacagtaaattcttcaaaaaattttaccgtcttaaattttaaacgaaggaaaatgtgctacaaaaaacttgaagaagtaaaaacttcagccttggacaaaaacactagcagaactatttatgatcctgtacatgcagctccaaccacttctacgcgtgtgttttatattagtgtaggggtttgttgtgcagtaatatttctcgtagcaataatattagctgttttgcaccttcatagtatgaaaaggattgaactggatgac

SEQ ID NO: 634 - DNA, 327 bp, Homo sapiens
gccttgcggtatcatcccgacaagaatccagggaatgctcaagcagcagaaatattcaaagagatcaacgcagctcatgccatactgagcgactctaagaagcggaaaatttacgaccagcatggctcattgggaatatatctgtatgatcactttggtgaagaaggcgtcagatactattttattctgaatagttgttggttcaagacacttgtcatcctgtgtactctgctcacttgttgctgtttctgttgttgctgctgtttttgctgtggagcacttaaaccaccacctgagcaggatagtgggagaaaatatcagcagaat

SEQ ID NO: 635 - DNA, 255 bp, Homo sapiens
gatccagaactgcaaccggtcctcgctttgctctccctgtccctgtccatgtatctggtcacggtgatgaggaacctgctcagcatcctgactgtcagctctgtctctcccctccacacccccatgtacttcttcctctccaacctgtgctgggctgacatcggtttcacctcggccacggttcccacgatgattgtggacatgcagtcgcatagcagagtcatccctcatgcgggctgcctgacgcagatgtat

SEQ ID NO: 636 - DNA, 633 bp, Homo sapiens
atggccaactcaggcctccagctcctgggctacttcttggccctgggtggctgggtgggcatcattgctagcacagccctgccacagtggaagcagtcttcctacgcaggcgacgccatcatcactgccgtgggcctctatgaagggctctggatgtcctgcgcctcccagagcactgggcaagtgcagtgcaagctctacgactcgctgctcgccctggacggtcacatccaatcagcgcgggccctgatggtggtggccgtgctcctgggcttcgtggccatggtcctcagcgtagttggcatgaagtgtacgcgggtgggagacagcaaccccattgccaagggccgtgttgccatcgccgggggagccctcttcatcctggcaggcctctgcactttgactgctgtctcgtggtatgccaccctggtgacccaggagttcttcaacccaagcacacctgtcaatgccaggtatgaatttggcccagccctgttcgtgggctgggcctcagctggcctggccgtgctgggcggctccttcctctgctgcacatgcccggagccagagagacccaacagcagcccacagccctatcggcctggaccctctgctgctgcccgagagtacgtc

SEQ ID NO: 637 - DNA, 717 bp, Homo sapiens
ctctcttgggccccaggtaagggtaccagtttcttcctgagccatgaccagagccattcccagataaatgaggtttcctggaaggatgttaccagtgccttatctctggccaacatggtgctggggctcttctccatcatcttcagcttcagcaggaaatgccactatgcctcccggatgctcctggtcagcttcctgttagacatggcagtcagggcaatgaccagccacatcaacatatgctccaaattgggagccgagctgaatgactttgccgtcttcaccaccttcggcttggcctccgctctgctcctaggcgtggatggacttctgagtgggatcctggccatcatctatgtgtcagctgcttctttccacttgtgcttttattcacctggagtcccctccacatacaagggtctaccctgcccctatgcttcctgcatcttggcttccacctcccttctgaccaaaggcaacaggttcatcctctgctgcatggcctcactcatgattctcttcatgatggaccagagctactatccatatgacaaaatcctggagtctgagaactggaaaaaattggtttatataggaggtgtcatcatgctgtttttctccccattgtctctgtctgctttttactgcctgatgtggtcgctctcgtacatcttctttccagatgctctgtggggcaaggcagcctgtctttcgcca

SEQ ID NO: 638 - DNA, 384 bp, Homo sapiens
atggccattttcacaatattgattcttcctatccatgagcatggaatgtttttccatttgtttgtgtcttctctgatttccttgagcagtggtttgtggttctcctcaaaaaggtcctttgcttcccttgttagttttattcctaggtattttattctctttgtagcaattatgaatgtgagtttattcatgatttggctctatgcttgcatgctgttggtgtataggaatgctagtgatttttgcacattgattttatatccccaggctttgctgaagttgcttatcagcttaagaagcttttgcactgagacaatggagttttctaggtacaggatcatgtcatctgcaaacaaagataatatgacttcctctctttctatt

SEQ ID NO: 639 - DNA, 255 bp, Homo sapiens
atggccgcactgacgacggttgtggtagcggctgcggccaccgcggtagccggggctgtggcaggggcgggcgcggccaccgggaccggcgtgggagcgacgccagcgcctcaacaggtaaatccgggagaaccgagagctgctctggcggcaggcgaggggctgcaggccctggctgaacagagtgatggctgttttagtacttcaggtggaattcgtccttttcatcttcagaactggaagcagaaagttaat

SEQ ID NO: 640 - DNA, 255 bp, Homo sapiens
atggctcatgccccagaaccagacccggccgccagcgacctcggggatgagaggcccaagtgggacaacaaggcccagtacctcctgagctgcatcgggtttgccgtggggctggggaacatttggcggttcccatacctgtgccagacctatggaggaggggccttcctcatcccctacgtcatcgcgctggtcttcgaggggatccccattttccacgtcgagctcgccatcggccagcggctgcggaagggc

SEQ ID NO: 641 - DNA, 255 bp, Homo sapiens
atgggcaccaccatatctggagataacattggaaaaaatttcactttttctatgagaattaatgataccagcaatgaagtcactgggagagtgttgatcagcagagatgaacttcggaaggtgccttccccttctcaggtcatcagcattgcatttccaactattggggctattttggaagccagtcttttggaaaatgttactgtaaatgggcttgtcctgtctgccattttgcccaaggaacttaaaagaatc

SEQ ID NO: 642 - DNA, 669 bp, Homo sapiens
atgagttggatgttcctcagagatctcctgagtggagtaaataaatactccactgggactggatggatttggctggctgtcgtgtttgtcttccgtttgctggtctacatggtggcagcagagcacgtgtggaaagatgagcagaaagagtttgagtgcaacagtagacagcccggttgcaaaaatgtgtgttttgatgacttcttccccatttcccaagtcagactttgggccttacaactgataatggtctccacaccttcacttctggtggttttacatgtagcctatcatgagggtagagagaaaaggcacagaaagaaactctatgtcagcccaggtacaatggatgggggcctatggtacgcttatcttatcagcctcattgttaaaactggttttgaaattggcttccttgttttattttataagctatatgatggctttagtgttccctaccttataaagtgtgatttgaagccttgtcccaacactgtggactgcttcatctccaaacccactgagaagacgatcttcatcctcttcttggtcatcacctcatgcttgtgtattgtgttgaatttcattgaactgagttttttggttctcaagtgctttattaagtgctgtctccaaaaatatttaaaaaaacctcaagtcctcagtgtg

SEQ ID NO: 643 - DNA, 192 bp, Homo sapiens
atgaacatagtacacactaggagggttttcagcccttgcccctttccctacacctccctccttttggagcccccagtgtctattgttctcatctttatgttcttatgtacacagggtttagctccactcataagtgagaacatgcaatatttgttcttttttttcaatactagtagattattaatagaaatg

SEQ ID NO: 644 - DNA, 789 bp, Homo sapiens
atgcgaagaatatccctgacttctagccctgtgcgccttcttttgtttctgctgttgctactaatagccttggagatcatggttggtggtcactctctttgcttcaacttcactataaaatcattgtccagacctggacagccctggtgtgaagcgcaggtcttcttgaataaaaatcttttccttcagtacaacagtgacaacaacatggtcaaacctctgggcctcctggggaagaaggtatatgccaccagcacttggggagaattgacccaaacgctgggagaagtggggcgagacctcaggatgctcctttgtgacatcaaaccccagataaagaccagtgatccttccactctgcaagtcgagatgttttgtcaacgtgaagcagaacggtgcactggtgcatcctggcagttcgccaccaatggagagaaatccctcctctttgacgcaatgaacatgacctggacagtaattaatcatgaagccagtaagatcaaggagacatggaagaaagacagagggctggaaaagtatttcaggaagctctcaaagggagactgcgatcactggctcagggaattcttagggcactgggaggcaatgccagaaccgacagtgtcaccagtaaatgcttcagatatccactggtcttcttctagtctaccagatagatggatcatcctgggggcattcatcctgttagttttaatgggaattgttctcatctgtgtctggtggcaaaatggtgagtggcaggctggtctctggcccttgaggacgtct

SEQ ID NO: 645 - DNA, 237 bp, Homo sapiens
gtgtgtgtgtgtgtgtgtgtgtgtgtgtgtgtgtgtgtgcacgcatatgtaggtagatatatatgtgtgtgtgtgtgtgtggtgtgtgcatacttagtgtatatgtttactcattataaacacattcagggaaaacttaaagggattatattctatacctattcatcaccttccttgttctcccgcaccttcactataattaaggataccagctcatatggggatatttctaaaaat

SEQ ID NO: 646 - DNA, 255 bp, Homo sapiens
atggctggcagtcacccctacttcaacctgcctgactccacacacccatcgccgccctccgctccacccagcctccgctggcaccagcgctgccagccctctggtgccaccaatggcctgctggtggccctgctgggtgggggcctgcctgctggcttcgtgggccccctttctcgtatggcttaccagggttccaacctgccctcgctggagctgctcatctgtcgatgcctcttccacctccctattgccctg

SEQ ID NO: 647 - DNA, 534 bp, Homo sapiens
atactgtctctagtctttttggatgatgtgcagtggatgaacaagtggcggctctattatcaagtcctaaattttggaatgattgtctcatcagcactcatgatctggaaggggttaatggtaataactggaagtgaaagtccaattgtgttgctcagtggcagcatggaacctgcatttcatagaggatatcttctctttctaacaaatcgagttgaagatcccatacgagtgggagaaatcgctgttctaaggatagaaggaagaaagattcctatagttcaccgagtcttgaagattcatgaaaagcaaaatgggcatatcaagtttttgaccaaaggagataataatgcggttgatgacagaggcctctataaacaagatcaacattggctagagaaaaaagatgtcgtggggagagccaggggatttgttccttatattggaattgggacgagcctcatgaatgactatcctaaacataagtatgaagtgctctttttgctgggtttatttgtgctggtccatcgtgag

SEQ ID NO: 648 - DNA, 285 bp, Homo sapiens
atttatatcaatatcatattagcatataccatatcacttctggggatattaacctatcgatcccacctgatagcatccctaatatgcctagaaggaataatattatcattattcatcataaatacccttataactttaaatatacatttcaccctagcattcataatacccattaccctcccagtatttgctgcctgcaaagctgcagtgggcctcgccttactagtttcaatctccaacacgtatggcctagattatgtacataacctaaatttacttcaatgc

SEQ ID NO: 649 - DNA, 552 bp, Homo sapiens
caggctgccatgggctctgtcgggagccagtgccttgaggagcccagtgtggcaggcacaccagacccgggcatagtgatgagcgtcaccttcgacagtcaccagctggaggaggcggcggaggcggctcagggccagggccttagggccaggggcgtcccagctttcacggataccacattggaggagccagtgcccaatgaccgctatcacgccatctactttgcgatgctgctgtctggcgtgggcttcctgctgccatacaacagcttcatcacggacgtggactacctgcatcacaagtacccagggacttccattgtgtttgacatgagcctcacctacatcttggtggcgctggcagccgtgctcctgaacaacgtcctggtggagagactgaccctgcacaccaggatcaccgcaagctacctcttagccttgggccctctcctttttatcagcatctgtgacgtgtggctgcagctcttctctcgggaccaggcctacgccatcaacctggctgctgtgggcaccgtggccttcggctgcaca

SEQ ID NO: 650 - DNA, 852 bp, Homo sapiens
atgcacgcgaggctcctggggctctcggccctgctgcaggcggccgaacagagcgcgcgcctttacaccgtggcttactacttcaccacaggacggcttctgtgggggtggctggcccttgctgtcctcctgcccgggttcttggtccaggccctgagctacctgtggttccgagcagacgggcatccagggcattgctccttggtgatgctgcacctcctacagcttggtgtttggaagcggcactgggacgctgcactgaccagtctgcagaaggaactggaggctccccaccgaggctggctgcagctgcaggaggccgacctgtcggcccttcgactcttggaggccctgctgcagactgggccccacctgctgcttcagacatatgtttttctagcctcagacttcacagatattgtgccaggggtgagcaccctgttttcctggtcctcactctcctgggcactggtgtcctacactcgcttcatgggcttcatgaagccaggccacctggccatgccatgggccgccctcttctgccagcagctctggaggatgggcatgttgggaacccgcgtgctgagtctggttctgttctacaaagcctaccacttttgggtttttgtggttgcaggtgcccactggctggtgatgacattctggcttgtcgcccagcagagtgacatcattgacagcacctgccactggaggctgttcaacctgctcgtgggggccgtgtacatcctctgctacctcagcttctgggacagcccttctagaaataggatggtcacgttctacatggcaagtggcacttttctttatcctaacttttacagtgtatacagc

SEQ ID NO: 651 - DNA, 204 bp, Homo sapiens
atgcgtagtaaatggcaaatggagaattctaacttagatctgtctcacttcaaaggtcacactgttgatcactacaatgtattagtttgggtggtcaaaatgagacccacaataatttgttatttgtctgtgtgtatgtgtgtgtgtgtgtgtgtgtgtgtgtgtgtgatttcaaaactctgctcaagcactgacagctctcgc

SEQ ID NO: 652 - DNA, 255 bp, Homo sapiens
ggcatgtctttaacttcagaatggtttgcaaagtatttgcaatcatcagcagctgcatgttgggtatatgccaatctaacatcttgtcaagctcttggaaatatgtgtgtgatgaacatgaattcttacgactttgccacatttgatgcatgtggactatttcagtttatctttgaaaatactgctggactgagcactgttcattctatttcattttggagacagaatcttccttggctgttttatggagaccag

SEQ ID NO: 653 - DNA, 828 bp, Homo sapiens
atgaactctctgagttggggggctgcgaatgccgtgctgctgctgctcctcctggcctgggccagccccaccttcatcagcatcaaccgcggggtgagggtgatgaagggccactctgccttcctgtcaggagatgacctgaagtttgccatccctaaagagaaagatgcctgcaaagtggaagttgtgatgaatgagccaataacccagagggttgggaaactcactccacaggtctttgactgccatttccttcccaacgaagtcaagtatgttcacaatggttgtccaattcttgatgaagacacagtgaagctcagactttacagatttactgaaagagataccttcatagaaacttttatcctgtgggtctatctcctggaaccagactgtaacatcatccatatgagtaacaatgtgctggaggtgcctgaattcaatggcttgtcccaagcgattgataaaaatctgctcagattcgattatgataggatggctagcctggaatgtaccgtcagcctggacactgcgagaactcggctgccagcccatggccagatggttctcggggagcctcgaccagaagaacctcgtggagatcagccacacagttttttcccagagtcccaactgagagcaaaactgaagtgtccaggtgggagctgtaccccaggattaaagaaaataggaagcctcaaagtgagctgtgaggagttcctgctgatgggccttcgttatcagcatctggatcccccttcacccaacattgattatatctccatccaactggacctcacagataccaggagcaaaattgtgtacaag

SEQ ID NO: 654 - DNA, 255 bp, Homo sapiens
atggccaggcatggctgtctagggctgggactgttctgctgcgtcctgtttgctgctactgtgggcccccagcccaccccctccatcccaggtgcccctgccaccactttgacccccgtacctcaaagtgaggcctctatgctgtctctcaacctgggacttaacttcaaattccatcttcggggacctgctgctgtctgggggagcccagtcacagagacccagccactctctcttgggccaggccaggagcca

SEQ ID NO: 655 - DNA, 732 bp, Homo sapiens
atgggagaccttttttccttattttgggaggtagatcctcccccaatacctgtaaattgtgccattccaaatcaggattatgaatgctggaaggatgactcttgtggaaccatagggagcttcctgctttggtattttgttatcgtatttgtcctgatgttcttctctagggcttctgtctggatgtctgaggataaaaaggatgaaggcagtgggacaagtacttcagtaaggaaagcaagcaaagagacttcctgtaagcggcaaagcaaagacagtgcctgggatccctcacaaacaatgaagaaaccaaagcagaaccaacttacccctgtaaccaactcagaagtggctttggtcaatgcctatcctgaacaaagacgagccaggcgccagtctcagttcaatgaggtgaaccagaaccaacatgacagtgatactacggagtatggcagtgaagagtctaactcagaagcctcctcgtggaaggagagtgaaagtgaacaccacccatcaccagacagtattaagaggagaaaaatggctcagaggcaaaggaatctgggaagttaccaaatgagcgaaaggcactgcctccactgcaaagccttgagaaccaacgaatggttggcgcaccattcccgacagaagccttcagtaacaccgccaatgaaaagagacagtcaagaggaaagttccatatctgacattaacaagaaatttagtaaattt

SEQ ID NO: 656 - DNA, 771 bp, Homo sapiens
gacacccacctacatacacccatgtacttcttcctgggcaatttttccctgctggagatcttggtaaccatgactgcagtgcccaggatgctctcagacctgttggtcccccacaaagtcattaccttcactggctgcatggtccagttctacttccacttttccctggggtccacctccttcctcatcctgacagacatggcccttgatcgctttgtggccatctgccacccactgcgctatggcactctgatgagccgggctatgtgtgtccagctggctggggctgcctgggcagctcctttcctagccatggtacccactgtcctctcccgagctcatcttgattactgccatggcgacgtcatcaaccacttcttctgtgacaatgaacctctcctgcagttgtcatgctctgacactcgcctgttggaattctgggactttctgatggccttgacctttgtcctcagctccttcctggtgaccctcatctcctatggctacatagtgaccactgtgctgcggatcccctctgccagcagctgccagaaggctttctccacttgcgggtctcacctcacactggtcttcatcggctacagtagtaccatctttctgtatgtcaggcctggcaaagctcactctgtgcaagtcaggaaggtcgtggccttggtgacttcagttctcaccccctttctcaatccctttatccttaccttctgcaatcagacagttaaaacagtgctacaggggcagatgcagaggctg

SEQ ID NO: 657 - DNA, 378 bp, Homo sapiens
cacactgcagagtcctcagtgtcttcctcgtcatcccatcggcagtccaagagcagtgggggctccagcagtggcaccatcacagatgaggatgaactgactggaatccttaagaaattatcacttgagaaatatcagcccatttttgaggaacaagaggtggacatggaagcgttcctcacactgactgacggtgacttgaaggagctgggaattaagacagatgggtccaggcagcagattctggcagcgatttctgaactgaacgcaggcaagcactgtgctgtgcagaggcggctcctctcagccctgccaggattggaggtggtggtttttgttgtcactgtcgtcattcttattacctgcctgaaggctata

SEQ ID NO: 658 - DNA, 591 bp, Homo sapiens
caattttcagtcttcgcccttaccaccataggatggatcctctcctctacgtccacgggcctcgtggagtggcgaatatggtacatgaaagacacctcgctctacccccctggaatcgcctgcgtgggaatatttagagtctgcatttaccggcgtcgcaccaacagcaccacaaccaaattttgttaccgatacagctaccaggacacctttctcccttttgaaatttccatggctcaacgcttcctactgactgccagcattttcggattcttcgggagagcctttaacatgtttgcacttagaaacatgtccatgagaatgtttgaggaggacacctacaattcattcgttgtttcaggaattctcaacattgctgctggtgtctttaacttaattgctgtgctccagaactacgatgccgtcataaactcacaggggatcaccttcctgccatctctccaaatgcccttcaagccagatgtgcaggaagttggcactgccattcaagtggcagggataggtgtcttgccgatgctgttaactgggatgttttctctgttttacaaatgtcccccgtacggccaagtg

SEQ ID NO: 659 - DNA, 255 bp, Homo sapiens
gaggagtttgtgttggaccctcatgggatcttgcggtcggctgtggtcttccagcacacagagtctctggaatacgtgttgtgtgtccaggcaaaggattcaggcaaaccccagcaagtttctcacacttacatccgcgtgcgagtcattgaggaaagcacccacaagcccacagccattcccctggaaattttcattgtcaccatggaggatgactttcctggtggggtcattgggaagattcatgccacagat

SEQ ID NO: 660 - DNA, 279 bp, Homo sapiens
atggaggtggtactgatctttgtatacagcctgctcgtcccggtggtcctggccagtgcagctaaggagaaggaaatagatccttttcattataactaccagaccctgaggattggaggattggtatttgatgtggtcctcttcctgccgagctgccatcttctaagtcacaggtgcaagtgcagtttcaatcagaagccccaggatccaggagataaggaagctcaggtggaaaacttcatcactgcaaatgcaaaagagccccagaaagcaaaaaac

SEQ ID NO: 661 - DNA, 513 bp, Homo sapiens
gcccttgttctatgctatttcctggaaacaaatgcaaagcagtataatatggttgacaaaaacgtgattgaaattggagctggaacagggctagtctccattgtggcaagtttacttggtgctcacgtgacggccacagatttacccgaattacttggaaacctgcaatataatatttcccgaaacaccaaaatgaaaagcaagcatttgcctcaggttaaagaactctcctggggagtagctttagatacaaacttccccaggtcttctaataattttgactatattttggcagcggatgtggtctacgctcatcctttcttggaagagctcctcattacctttgaccatctgtgcaaagaaaccaccatcatcctgtgggccatgaaattcaggttggagaaggaaaataaatttgtagatagatttaaggagttgtttgacctggaggaaatttccagtttccctagcctgaatattaagttgtataaagctgtgaagaaaaaccggagg

SEQ ID NO: 662 - DNA, 255 bp, Homo sapiens
atgacgtccacctgcaccaacagcacgcgcgagagtaacagcagccacacgtgcatgcccctctccaaaatgcccatcagcctggcccacggcatcatccgctcaaccgtgctggttatcttcctcgccgcctctttcgtcggcaacatagtgctggcgctagtgttgcagcgcaagccgcagctgctgcaggtgaccaaccgttttatctttaacctcctcgtcaccgacctgctgcagatttcgctcgtggcc

SEQ ID NO: 663 - DNA, 255 bp, Homo sapiens
atgttctttaaaaaattatcttgcaggttctgcatcactctttcttctctcatgctcttgacccagagggtcacgtccctctctctggacatttgtgaggggaaagtgaaggcagcatctggaggcttcaggagcaggagctctttgtctgagcatgtgtgtaaggcactgccctatttcagctacttgctctttttccctgctctcctgggaggctctctgtgctccttccagcgatttcaggctcgtgttcaa

SEQ ID NO: 664 - DNA, 342 bp, Homo sapiens
atgagctggaagaatttatatataatttttaatactttaattttactacctaatgtaactttcctgaaaagatttttcctcttgtacttttctcctttaaaagtggatctgccattggcagatggggatttaataaatactagaaaattatgtcaatgtaaaagattacaagaaaaatcctttagtggttacaagaaaattccttttggcttaggacttcagacaagagatatttacagggttcacttttacatgtggattaatatagttctctgtattgtgtgtgtaggcagaagtaccagcatcatcagaccttcctcagcgaccatcgctgcatatttc

SEQ ID NO: 665 - DNA, 255 bp, Homo sapiens
atgaagagagaaaggggagccctgtccagagcctccagggccctgcgccttgctccttttgtctaccttcttctgatccagacagaccccctggagggggtgaacatcaccagccccgtgcgcctgatccatggcaccgtggggaagtcggctctgctttctgtgcagtacagcagtaccagcagcgacaggcctgtagtgaagtggcagctgaagcgggacaagccagtgaccgtggtgcagtccattggcaca

SEQ ID NO: 666 - DNA, 729 bp, Homo sapiens
atgcagctccaggtgttctggactgggctggaatacacctgccggctcctgggcatcaccactgctgcagtgttgatcggcgtgggcactgagaccttcctccagggccagttcaaaagcctggctttctatctgctgtttacaggagccgctgtctccatatgtgaaggggcctactttgtggctcagctgctggccatctgcttccagtgtcaaccagggtccctggcagacagagtaagggagaaagcccactggctgggctgcttccagaagttcctggcctacctgctgctgtcggtggcctgcttcctccacccggtcctggtctggcacgtgaccatcccaggctccatgctcatcatcaccggcctggcctacttccttctgagcaagcggaagaagaggaaagctgcccccgaggtgctggcctccccagagcagtacacagacccctctagcagcgctgtgagcaccaccggctctggggacacagagcaaacctacactttccatggggccctcaaggaggggcccagctcccttttcatccacatgaagagtatcctgaaggggactaagaagcccagtgccctccagccccccaacaccctgatggagctgagcctggagccagccgactccctggccaagaagaagcaggtgcactttgaagacaacttggtccgcatagtcccctccctcgccgaaggtctggatgatggggac

SEQ ID NO: 667 - DNA, 255 bp, Homo sapiens
atgaatgagccactagactatttagcaaatgcttctgatttccccgattatgcagctgcttttggaaattgcactgatgaaaacatcccactcaagatgcactacctccctgttatttatggcattatcttcctcgtgggatttccaggcaatgcagtagtgatatccacttacattttcaaaatgagaccttggaagagcagcaccatcattatgctgaacctggcctgcacagatctgctgtatctgaccagc

SEQ ID NO: 668 - DNA, 285 bp, Homo sapiens
gtaggaggagctcaagtgctggcaacaggcaagacccctggggctgaaattgatttcaagtacgccctcatcgggactgctgtgggtgtcgccatatctgctggcttcctggccctgaagatctgcatgatcaggaggcacttatttgacgacgactcttccgacctgaaaagcacgcctgggggcctcagtgacaccatcccgctaaagaagagagccccaagggcatgtaaccagcttcagggggttttggaaatgtgtggtcgaattggggatatttcaggt

SEQ ID NO: 669 - DNA, 639 bp, Homo sapiens
atcattgatatgtctcttgcttctttcgccaccccaaagatgattacagattacctaacaggtcacaaaaccatctcttttgatggctgccttacccagatattctttctccaccttttcactggaactgagatcatcttactcatggccatgtcctttgataggtatattgcaatatgcaagcccctgcactatgcttctgtcattagtccccaggtgtgtgttgctctcgtggtggcttcctggattatgggagttatgcattcaatgagtcaggtcatatttgccctcacgttaccattctgtggtccctatgaggtagacagctttttctgtgaccttcctgtggtgttccagttggcttgtgtggatacttatgttctgggcctctttatgatctcaacaagtggcataattgcgttgtcctgttttattgttttatttaattcatatgttattgtcctggttactgtgaagcatcattcttccagaggatcatctaaggccctttctacttgtacagctcatttcattgttgtcttcttgttctttgggccatgcatcttcatctacatgtggccactaagcagctttctcacagacaagattctgtctgtgttttataccatctttactccc

SEQ ID NO: 670 - DNA, 498 bp, Homo sapiens
atgttgcctttcttttccaacaccacctccaagtccgtgtctgtttcctcctttcaagggtctcctgctaccccactctctttccttttctttttcttcctttgcagagccggctcctcaatgactggctgctttaccttcttcttggacttcatctttttcttcgcgggggttttagggccatctcctatggggatgtattccggagcctccactttgactggcttctttttacttcgtttcctagggcagctctccatggacctggagggcttggagtggcttgggagggcgtctccctcctggtggatttttttttcttcttcgccttcccaccgtgttccctggggctcttgtgcttccgcttctgccccaaggctacctgttcctcaccctccttccccactgagcaagtgtccacagcatccccgacctcgcagaaccaagggtcctggactgagaaagctgtggggtcctgggccccctttttttccttct

SEQ ID NO: 671 - DNA, 222 bp, Homo sapiens
atgattaaacattcctggattcatctgtatgtaatggcttctgccatgtcctcttcacctatcttttttttttttcaaagatggagtcttactctctcacttaggctagagtgcagttccgcaatcataaagcccactgcagcttcaaactcctgcgttcaagtgaatctcccacctagtatgtgtgattataggcatgagccactgtgcctggcatttctg

SEQ ID NO: 672 - DNA, 642 bp, Homo sapiens
atgaagctgaatctggtgcagatctttttcatgttgctgatgctgctgctgggcctggggatgggcctggggttgggacttcatatggctacagcagtcttggaggagagtgatcaaccgctcaatgaattttggtccagtgactcacaggacaaagctgaggccactgaggagggagacggcacccaaaccacagaaacgctggtgcttagcaacaaagaagtggtgcaacctggctggccagaagatcccatcctcggtgaagatgaggttgggggtaacaagatgctcagagcctcagctctctttcagagcaacaaagactatcttaggcttgaccagacagatagagaatgcaatgatatgatggcacacaagatgaaggagcccagtcagagttgcatagcccagtatgcattcatccatgaggatctaaacacagtcaaagctgtctgtaacagtcctgtcattgcctgtgagctcaaggggggaaaatgtcacaaaagctcccgaccttttgatttgacattgtgcgagctgtcccaaccagaccaggtcactcctaactgcaattacctaacttctgttataaaaaagcacattattataacctgtaatgacatgaagcgccagttaccaact

SEQ ID NO: 673 - DNA, 387 bp, Homo sapiens
tggctgcctgaaagtgcaaggtatgatgtgctgtcagggaaccaggaaaaggcaatcgccaccttaaagaggatagcaactgaaaacggagctcccatgccgctggggaaactcatcatctccagacaggaagaccgaggcaaaatgagggaccttttcacaccccattttagatggacaactttgctgctgtggtttatatggttttccaatgcattctcttactacgggttagttctactcaccacagaactcttccaggcaggagatgtctgcggcatctccagtcggaagaaggctgtagaggcaaaatgcagcctggcctgcgagtacctgagtgaggaggattacatggacttgctgtggaccaccctctctgagtttcca

SEQ ID NO: 674 - DNA, 255 bp, Homo sapiens
acctgccctttctcctgcaagtgtgacagccgcagcctggaggtggactgcagtggccttggcctcaccacggtgcccccagacgtgcccgcagccacccgaaccctcttgctcttgaacaataagctgagtgccctgccaagctgggctttcgccaacctctccagcctgcagcggttggacctgtccaacaacttcctggaccggctgccccgctccattttcggggacctgacgaatctgactgagcttcag

SEQ ID NO: 675 - DNA, 540 bp, Homo sapiens
aacaacttcagcacagaaataaacaccacttccattttaataggacctcttgtttccaatctggaaataacccatacctcaaacctcacctgtgtaaaatttagcaatactatagacacacccaactcccaatgcatcaggtgggtaagtcatcccacacgaatagtctgcctaccctcaggaatattttttgtctgtggtacctcagcctatcgttgtttcaagggctcatcagaatctatatgcttcctctcattcttagtgccccctatgaccatctacactgaacaggatttatacaatcatgtcgtacctaagccccgcaacaaaagagtacccattcttacttttgttgtgggagcaggagggttaggcggattaggtactggcattggcggtatcacaacctctactcagttctactacaaactatctcaagaactaaatggtgacatggaatgggttgctgactccctagtcaccttgcaagatcaacttaactccctagtagcagtagttcttcaaaatcgaagagcttta

SEQ ID NO: 676 - DNA, 255 bp, Homo sapiens
cccagaagaaaatatcatgtgagactcctggcttacaacaacatagacgatggctatcaggcagatcagactgtcagcactccaggatgcgtgtctgttcgtgatcgcatggtccctcctccaccaccaccccaccatctctatgcgaaggctaacacctcatcttccatcttcctgcactggaggaggcctgcattcaccgctgcacaaatcattaactacaccatccgctgtaatcctgttggcctgcagaat

SEQ ID NO: 677 - DNA, 678 bp, Homo sapiens
caaggcggcacggagtggcccctggaaggacagcgcctacaggcagtgtctgtaccttcagctggaacacgtggagcaagagctgcggctggtggggccccgaggcttctcccagccccacagccatgcctaggccctcaggcagctgcagaccctgaagggcggcctgggggtacagccgggcacctgggcccctgcacatgccaggtgctgggattcgctgctttctttgcactggtcttgaagagagtggacgatgaggaggatactgtggccccgctgccaggacatctgttgggcccagacccctatgccttgttccgagcacgaagaaacagcagcagggatgtctaccagccacctctcaccgctgccattgagaagatgaaaaccacccacctcaaggaacagaaagcatttgccctcatcagagaaatcctggcatacttgggcttcctgtggatgctactgctcgtggcctacgggcagagggaccccagcgcctaccacctcaacagacacctccagcacagcttcaccaggggcttttcaggtgtgctcggcttccgagagttcttcaagtgggccaacaccaccctcgtgagtaacctgtatggtcaccccccagcagccgcaggcatatctcaacggatgccgtgcaccatattccctggatgc

SEQ ID NO: 678 - DNA, 255 bp, Homo sapiens
atggcccaggcagtgtggtcgcgcctcggccgcatcctctggcttgcctgcctcctgccctgggccccggcaggggtggccgcaggcctgtatgaactcaatctcaccaccgatagccctgccaccacgggagcggtggtgaccatctcggccagcctggtggccaaggacaacggcagcctggccctgcccgctgacgcccacctctaccgcttccactggatccacaccccgctggtgcttactggcaagatg

SEQ ID NO: 679 - DNA, 645 bp, Homo sapiens
atggggctagaaaaacctcaaagtaaactggaaggaggcatgcatccccagctgataccttcggttattgctgtagttttcatcttacttctcagtgtctgttttattgcaagttgtttggtgactcatcacaacttttcacgctgtaagagaggcacaggagtgcacaagttagagcaccatgcaaagctcaaatgcatcaaagagaaatcagaactgaaaagtgctgaagggagcacctggaactgttgtcctattgactggagagccttccagtccaactgctattttcctcttactgacaacaagacgtgggctgagagtgaaaggaactgttcagggatgggggcccatctgatgaccatcagcacggaagctgagcagaactttattattcagtttctggatagacggctttcctatttccttggacttagagatgagaatgccaaaggtcagtggcgttgggtggaccagacgccatttaacccacgcagagtattctggcataagaatgaacccgacaactctcagggagaaaactgtgttgttcttgtttataaccaagataaatgggcctggaatgatgttccttgtaactttgaagcaagtaggatttgtaaaatacctggaacaacattgaac

SEQ ID NO: 680 - DNA, 255 bp, Homo sapiens
ggtgccgtgtgcagcgtgggccacggccgacagcatccacacgggcacctccgtgtggcctcctcgtgctcctgctgcactggagccagtgtcagaaatgcaactgagccacctggagtaagcccgagtcccatccccaacagccaaagactgtccggcaccttaaaagttggatttggtgccatggagggacagaccccaggaagcaggggccttccagaaaagcctcaccctgccacggctgctgccactctg

SEQ ID NO: 681 - DNA, 474 bp, Homo sapiens
agacaccccttggccacctttttccacctgtttttccgagtgagtgccatcgtcacctacgtgagctgcgactggttcagcaagagctttgtgggctgttttgtcatggtgctgctcctcctgtccctggacttctggtctgtgaagaatgtaaccggaagactcctggtgggccttcgatggtggaaccagatagatgaagatgggaagagccactggatctttgaagccaggaaggtctctccgaatagcattgctgccacagaagctgaagcacgaatcttctggctgggcctcataatctgccccatgatatggattgtgtttttttttagcaccttattttccttgaagctaaagtggctggctctggtggttgctgggatctctctccaagctgcaaacctgtatggctacatcctttgtaagatgggaggcaacagtgacattggcaaggtcacagccagtttcctg

SEQ ID NO: 682 - DNA, 687 bp, Homo sapiens
atgtgcggcccgcggcggctcgcagctcccggcagcagcctcggcagcttcggccgcgcctcgagaggcggccgcagaggctccagcggcggccgagcggccgagcccgggctgggagacaccatgcgccgcgtccttcggctgctcctcggttgcttcctcaccgagctgtgcgcccgcgtgtgccgggcgcaggagcgagcgggacacgggcagctggcgcaactgggcggcgtgttgctgctggcggggggcaaccgctccggggccgcctccggagaggccagcgagggcgctgaggcatcggacgcgcccccgacccgggcgcccacgccggacttctgccggggctacttcgatgtcatgggccagtgggacccgccgttcaactgcagctcgggcgacttcatcttctgctgcgggacttgtggcttccggttctgctgcacgtttaagaagcggcgactgaaccaaagcacctgcaccaactacgacacgccgctctggctcaacaccggcaagccccccgcccgcaaggacgaccccttgcacgaccccaccaaggacaagaccaacctgatcgtctacatcatctgcggggtggtggccgtcatggtgctcgtgggcatcttcaccaagctggggctggagaaagcgcaccggccccaaagggagcacatgtccagg

SEQ ID NO: 683 - DNA, 867 bp, Homo sapiens
ctgctggtggccctgctgggtgggggcctgcctgctggcttcgtgggccccctttctcgtatggcttaccaggcttccaacctgccctcgctggagctgctcatctggcgatgcctcttccacctccctattgccctgctacttaaactgcgtggcgacccccttctgggaactcctgacatccgaagccgggccttcttctgtgccctgctcaacatcctcagcattggatgtgcctacagtgcggttcaggtggtgcccgctggcaacgctgccactgttcgcaaaggttcttccaccgtctgctccgccgtcctcactctctgccttgagagccagggtctcagtggctacgactggtgtggactgttgggctgcatcctaggactaatcatcattgtgggacctggactctggacactacaggaggggaccacgggtgtctacaccgccctgggctatgtggaggctttcctgggaggcctggcgctgtccctgaggcttctggtctatcgttctctgcactttcccccctgcctcccaacagtggccttcctatctggcttggtggggctgctgggctctgtgccaggcctctttgtgctgcaggcccccgtgttgcccagtgacctcctgagttggagttgtgtgggggcagtggggatcctcgccttggtctccttcacatgtgtgggctatgcggtcaccaaggcccaccctgccctggtgtgcgctgtcctacattccgaggtggttgtggcccttatactgcagtattatatgctccatgagactgtggcaccttctgacatcgtggcggcaggggttgtgctgggcagcattgccatcattacagcccagaacctc

SEQ ID NO: 684 - DNA, 405 bp, Homo sapiens
atgaattgtgatgctttgctacatcattctgcaatcccagaagattttttgcatatttttttgctattacagaaatcagtctccctccctctctctctctctcaatctgtgtgtctcttttactccatatctctgtgtgtgtctcttttactccatatctctctgtgtgtgtctgtttatgtctctctctctctctcatccttcccatgtttctctctcacacacacacacactcattcacagctttcaaaagacacgtctgtccttaccttcactttttgttttaaacagcacactcactttactctgaactatacctcacatgcacacgagctttctgctccatctgttcatcccacatgtgtcttcacattcaaagcagcaccttccccaagaccagctacc

SEQ ID NO: 685 - DNA, 255 bp, Homo sapiens
attatttctcctgtcctttcttataggatactcactttgtttccaaatgccatagctcgaaaattactgctgatgttgacatttatcttaattttctggatcatttacttggcttcaaaagaccacacaaagttctcgttcaacttggaaaaccatattatcctgaaccaagggaacatcttcaaaaaatattcacactctgaaacaccactgtgtccagcagtttcaccaaaagagactgaacttagaataaag

SEQ ID NO: 686 - DNA, 255 bp, Homo sapiens
ctttgtttcccaggctctctgagcacgatgtctgcagctcccgccagcaatggagtgtttgttgtcatcccgccaaacaacgccagtggcctctgcccacctccggccattctgcccacatccatgtgccaacctccagggattatgcagtttgaggagccaccgctgggggcacagacaccaagggccacacagccacctgacttgcggcccgtggagacattcctgacaggagagcccaaagttttggggggg

SEQ ID NO: 687 - DNA, 420 bp, Homo sapiens
gccttccacatcaccatcgctctgctgcacctggtctttgggggctacctggcctctatagtcaagaaccttcacctggtggtgctgaagtcttggtatccattctggggggctgcctcttttctcatttcagggatcttggcgataacaatgaagaccttttctaaaacttacctgaagatgttgtgcctgatgacaaacctcatcagcctcttttgcgtgctgtctggcctcttcgtcatctccaaggatctctttctggagagcccatttgagtccccgatctggagaatgtaccccaactccacggtccacatccagaggctggagctggccttgctctgcttcactgtcctagagctcttcctgccagtgcccacagctgtcacagcctggagaggggactgcccatctgcaaag

SEQ ID NO: 688 - DNA, 480 bp, Homo sapiens
atgttatccccccacatttacctcccaaagtgctggaattacagacatgagccactgtgcctggccgtgtgctttcattttcagttaagtctctgcttttgttgctttattctttccctgctttgtttgtgtgttttgttcaattctttgttcaaaacaccaagaacttgtacagcctccactggtaacatattttggcaagccagccaggaggtaatcccaaagtttggggtttatttttcttgtttgtttttcctgctccatacaggggaatctcagtctctctctctcttttcctttccaacttgggacggttggtgggcagcacctaaacacagaggcaactgcaggtttctggccggggccactctgaaggactcctttctatcttttccagttgtggtccctgatccctacgtgtggcacagcttggggcgagctggcatttgtttcagtgacttaaaccttgttttctcatgc

SEQ ID NO: 689 - DNA, 537 bp, Homo sapiens
aacaacttcagcacagaaataaacaccacttctgttttagtaggtcctctttccaatctggaaataacccatacctcaaacctcacctgtgtaaaatttagcaatactatagacacaaccaactcccaatgcatcaggtgggtaactcctcccacacgaatagtctgcctaccctcaggaatattttttgtctgtggtacctcagcctatcattgtttgaatggctcttcagaatctgtgtgcttcctctcattcttagtggcccctatgcccatctacactgaacaagatttatacaatcatgtcatacctaagccccgcaacaaaagagtacccattcttccttttgttattggagcaggagtgctaggcggagtagctactggcattggcggtatcacaacctctactcagttctactacaaactgtctcaagaactaaatggtgacatggaatgggtcgctgataccctggtcaccttgcaagatcaacttaactccctagcagcagtagtccttcaaaatcgaagagcttta

SEQ ID NO: 690 - DNA, 831 bp, Homo sapiens
atgccgcagctgagcctgtcctggctgggcctcgggcaggtggcagcattcccgtggctgctcctgctgctggctggggcctcccggctcctggccggcttcctggcctggacctatgccttctatgacaactgccgccgccttcagtactttccacaacccccaaaacagaaatggttttggggtcaaccaggacctcaggaaggcttgaagaacttgacccagatgtcagccacctatccccagggctttaggatatggctgggtcccatcttccccttcatcgttttatgccaccctgacatcgtccggtctatcaccaatgcctcagctgctattgcgcccaaggatgatctctccatcaggttcctgaagccctggctgggagaagggatactgctgagtggcggtgacaagtggagccgccaccgtcggatgctgacgcccgccttccatttcaacatcctgaaaccctatataaagatcttcaacaggagtgtgaacatcatgcacgacaagtggcagcacctggcctcagagggcagcagtcgtctggacatgtttgagcacatcagcctcatgaccttggacagtctgcagaaatgcatcttcagctttgacagccattgtcaggagaggcccagtgaatatattgctaccatcttggagctcagtgcccttgtagaaaaaagaaaccagcatatcctccagcacatggactttctgtattacctctcccatgacgggtggcgcttccgcagggcctgccgcctggtgcacgacttcacagatgccgtcatccaggagcggcgccatacccttcccactcag

SEQ ID NO: 691 - DNA, 255 bp, Homo sapiens
tgcgggagccggagcggagccggggccggagcgggcggaatggagcccctgcgcgcgcccgcgctgcgccgcctgctgccgccgctgctgctcctgctgctgtcactgcccccccgcgcccgggccaagtacgtgcggggcaacctcagttccaaggaggactgggtgttcctgacaagattttgtttcctctcggattacggccgactggacttccgtttccgctaccctgaggccaagtgctgtcagaacatc

SEQ ID NO: 692 - DNA, 309 bp, Homo sapiens
aaagacaacaaggactgcagctcctacggcagcttcagcgacgcagtgctggaactcttcaagctcaccataggcctgggtgacctgaacatccagcagaactccaagtatcccattctctttctgttcctgctcatcacctatgtcatcctcacctttgttctcctcctcaacatgctcattgctctgatgggcgagactgtggagaacgtctccaaggagagcgaacgcatctggcgcctgcaggtgagcctaggtggagaccccagcgtgggggcctccacgggactcagttcagcacgtggtcat

SEQ ID NO: 693 - DNA, 255 bp, Homo sapiens
gctggagtctcggccgcgggcgatgaggtgcagacgctgtcgggcagcgtaaggcgggccccgaccggaccccccggcacccccggcacccccggctgcgcagctactgcaaagggccccggcgctcagcagcccaaaccggccagcttgggccgcgggcggggggcagccgccgccatcctcagcttgggcaacgtgctcaactacctggacaggtacaccgtggcaggcgtccttctggacatccagcagcac

SEQ ID NO: 694 - DNA, 792 bp, Homo sapiens
atgcctagcatcttcgcctatcagagctccgaggtggactggtgtgagagcaacttccagtactcggagctggtggccgagttctacaacacgttctccaatatccccttcttcatcttcgggccactgatgatgctcctgatgcacccgtatgcccagaagcgctcccgctacatttacgttgtctgggtcctcttcatgatcataggcctgttctccatgtatttccacatgacgctcagcttcctgggccagctgctggacgagatcgccatcctgtggctcctgggcagtggctatagcatatggatgccccgctgctatttcccctccttccttggggggaacaggtcccagttcatccgcctggtcttcatcaccactgtggtcagcacccttctgtccttcctgcggcccacggtcaacgcctacgccctcaacagcattgccctgcacattctctacatcgtgtgccaggagtacaggaagaccagcaataaggagcttcggcacctgattgaggtctccgtggttttatgggctgttgctctgaccagctggatcagtgaccgtctgctttgcagcttctggcagaggattcatttcttctatctgcacagcatctggcatgtgctcatcagcatcaccttcccttatggcatggtcaccatggccttggtggatgccaactatgagatgccaggtgaaaccctcaaagtccgctactggcctcgggacagttggcccgtggggctgccctacgtggaaatccggggtgatgacaaggactgc

SEQ ID NO: 695 - DNA, 393 bp, Homo sapiens
atgagccgggaggggcgggctccggccagtgtcgggggcacacaagggcctgcttccccctccctttcactgggcgactggaggacaggcggaggagtgtggctgggcggctggaggacaggcggaggagtgtggcagccggacagctggaggacaggcggaggagtgtggtggctggcagggtatgtgtttctggttctgttgagtgatgcttggaagatcgttctgagaggtcagggcagctcccgggaccccagagcactgggctcctgcaggggactaggaggccggcttttatcagctcatgagcttttaaaaatggagagaagggcaggtgtggtggctcatccctataatcccagcactttgggaggtcggggtgagaggatcatt

SEQ ID NO: 696 - DNA, 621 bp, Homo sapiens
atgtacctggtcacggtgctggggaacctgctcattatcctggccatcggctctgactcccacctcgacacccccatgtacttcttcctctccaacctgtccttgcctgacatcggtttcacctcggccacggtccccaagatgattgaggagatgcaatcgcatagcagagtcatctaccatggggactgcctgacacagatgtctttctttgtcctttttgcatgtaaggatgacatgatcctgactgtgatggcctatgactggtttgtggccatctgtcaccccctgaactacccaggcatcatgaatcctcacctctgtgtcttattagttttggtgccttttttccttagcctgttggattcccagctgcacaatttgattgtgttacaattcatctgcttcaagaatgtggaaatctctaattttttctgtgacccgtttcaacgtctcaaccttgcctgttctgacagtgacatcaataacatatacatatatttagatagtactatatttggttttcttcgcatttcagggatccttttgtgttactatacagttgtcttccccattctaagaattccatcctcagatgggaattataaagccttctccacc

SEQ ID NO: 697 - DNA, 813 bp, Homo sapiens
atgaacatcatcctagaaatccttctgcttctgatcaccatcatctactcctacttggagtcgttggtgaagtttttcattcctcagaggagaaaatctgtggctggggagattgttctcattactggagctgggcatggaataggcaggcagactacttatgaatttgcaaaacgacagagcatattggttctgtgggatattaataagcgcggtgtggaggaaactgcagctgagtgccgaaaactaggcgtcactgcgcatgcgtatgtggtagactgcagcaacagagaagagatctatcgctctctaaatcaggtgaagaaagaagtgggtgatgtaacaatcgtggtgaataatgctgggacagtatatccagccgatcttctcagcaccaaggatgaagagattaccaagacatttgaggtcaacatcctaggacatttttggatcacaaaagcacttcttccatcgatgatggagagaaatcatggccacatcgtcacagtggcttcagtgtgcggccacgaagggattccttacctcatcccatattgttccagcaaatttgccgctgttggctttcacagaggtctgacatcagaacttcaggccttgggaaaaactggtatcaaaacctcatgtctctgcccagtttttgtgaatactgggttcaccaaaaatccaagcacaagattatggcctgtattggagacagatgaagtcgtaagaagtctgatagatggaatacttaccaataagaaaatgatttttgttccatcgtatatcaatatctttctgagactacagaag

SEQ ID NO: 698 - DNA, 639 bp, Homo sapiens
tttgcagattcttgcttttcaacttccacagcccctagattaattgtggatgctctctctgaaaagaaaattataacctacaatgagtgcatgacacaagtctttgcactacatttatttggctgcatggagatctttgtcctcattctcatggctgttgatcgctatgtggccatctgtaagcccttgcgttacccaaccatcatgagccagcaggtctgcatcatcctgattgttcttgcctggatagggtctttaatacactctacagctcagattatcctggccttaagattgcctttctgtggaccctatttgattgatcattattgctgtgatttgcagcccttgttgaaacttgcctgcatggacacttacatgatcaacctgctgttggtgtctaacagtggggcaatttgctcaagtagtttcatgattttgataatttcatatattgtcatcttgcattcactgagaaaccacagtgccaaagggaagaaaaaggctctctccgcttgcacgtctcacataattgtagtcatcttattctttggcccatgtatattcatatatacacgccccccgaccactttccccatggacaagatggtggcagtattttatactattggaacaccc

SEQ ID NO: 699 - DNA, 255 bp, Homo sapiens
atggctcacatcaattgcacccaggcgacagagtttattcttgtgggcctcacagaccatcaggagttgaagatgcccctctttgtgctattcttatccatctacctcttcacagtggtaggcaacttgggtttgatcctactcattagagcggatacaagtctcaacacaccaatgtacttctttcttagcaacctagcttttgtggatttctgttactcttctgtcattacacccaaaatgcttgggaatttc

SEQ ID NO: 700 - DNA, 255 bp, Homo sapiens
aggttggtgctatgtaatgacatggatatgaacgagctgcctacgaacctccccgtggacactgtgaagcttcgcatagagaagactgtcatccgcagaatctctgcggaggccttctattacctggtggagctccagtatctctgggtgacttacaattccgtggccagcattgaccccagcagcttttacaacctgaagcaactgcatgagttgcgcttggatgggaattctctggctgctttcccttgggca

SEQ ID NO: 701 - DNA, 693 bp, Homo sapiens
atggccacctccgccgcctcctccgagcgtttcaagaagctgcacgaaatcttccgcggcctccacgaagacctacaaggggtgcccgagcagctgctggggacggcggggaccgaagagaataagtcgatcagggattttgatgaaaagcaacaggaagcaaatgaaatgctggcagggatggaggaggagctacgttatgcacccctgtctttccataacaccatgacgtctaagcttcgaaactaccggaaggaccttgccaaactccatcgggaggtgagaagcacgcctttgacagccacaccaggagggcgaggagacatgaaatatgacatatatgctgtagagaatgagcatatgaatcggctacagtctcaaagggcaatgcttctgcaaggtcctgaaaacctgaaccgggccacccaaagtattgaacgttctcatcagattgccacggagactgaccagattggctcagaaaccatagaagagctgggggaacaacgagaccatttagaacgcaccaagagtagactgataaacacaactgaaaacttgagcaaaagtcgaaagattctccgttcaatgtccagaaaagtgacaaccaacaagctgctgttttccatcatcatcttactggagctcgccgtcctgggaggcctggtttactacagattctttcgcaaccat

SEQ ID NO: 702 - DNA, 255 bp, Homo sapiens
aaccattcaagcctggctgaatttgtgttccttggctttgccagtgtgggctatgtcaggggctggctttttgtcctgctgctattggcatacctgttcaccatctgtggtaacatgctcatcttctcagtcatccgactggatgcagctctgcacacacctatgtaccactttgtcagtgttctttccttcttggagttgtggtatacagctaccactatccctaagatgttgtctaatattctcagtgagaag

SEQ ID NO: 703 - DNA, 903 bp, Homo sapiens
ctggaagtagataatcatacagtgacaacacgtttcattcttctggggtttccaacacgaccagccttccagcttctctttttctccattttcctggcaacctatctgctgacactgctggagaatcttcttatcatcttagctatccacagtgatgggcagctgcataagcccatgtacttcttcttgagccacctctccttcctggagatgtggtatgtcacagtcatcagccccaagatgcttgttgacttcctcagtcatgacaagagtatttccttcaatggctgcatgactcaactttacttttttgtgacctttgtctgcactgagtacatccttcttgctatcatggcctttgaccgctatgtagccatttgtaatccactacgctacccagtcatcatgaccaaccagctctgtggcacactggctggaggatgctggttctgtggactcatgactgccatgattaagatggtttttatagcacaacttcactactgtggcatgcctcagatcaatcactacttttgtgatatctctccactccttaacgtctcctgtgaggatgcctcacaggctgagatggtggacttcttcttggccctcatggtcattgctattcctctttgtgttgtggtggcatcctacgctgctatccttgccaccatcctcaggatcccttctgctcagggccgccaaaaggcattctccacctgtgcctcccacctgaccgtcgtaattctcttctattccatgacacttttcacctatgcccgtcccaaactcatgtatgcctacaattccaacaaagtggtatctgttctctacactgtcattgttccactcctcaaccccatcatttactgtctgaggaaccatgaagtaaaggcagccctc

SEQ ID NO: 704 - DNA, 255 bp, Homo sapiens
gaaaacttcaccatttggagcatttttttcttggagggattttcccagtacccagggttagaagtggttctcttcgtcttcagccttgtaatgtatctgacaacgctcttgggcaacagcactcttattttgatcactatcctagattcacgccttaaaacccccatgtacttattccttggaaatctctctttcatggatatttgttacacatctgcctctgttcctactttgctggtgaacttgctgtcatcc

SEQ ID NO: 705 - DNA, 255 bp, Homo sapiens
atgttccgcctctggttgctgctggccgggctctgcggcctcctggcgtcaagacccggttttcaaaattcacttctacagatcgtaattccagagaaaatccaaacaaatacaaatgacagttcagaaatagaatatgaacaaatatcctatattattccaatagatgagaaactgtacactgtgcaccttaaacaaagatattttttagcagataattttatgatctatttgtacaatcaaggatctatgaat

SEQ ID NO: 706 - DNA, 255 bp, Homo sapiens
atgaaaacctcgaaggcatcccagcgctatagaggcatccggagaaatgccagccagtgctacctctaccaggaatctctgctgctcagcaacttggatgacagctttagtgctgatgaaacaggggacagcaatgatccggaacaaatcttccagaatatacagttccagaaagatctcatggcaaacattcgctgcagaccctggactatgggacagaagctgagggcattgagacaagcgaagaacattgtg

SEQ ID NO: 707 - DNA, 255 bp, Homo sapiens
atggatccaaccatctcaaccttggacacagaactgacaccaatcaacggaactgaggagactctttgctacaagcagaccttgagcctcacggtgctgacgtgcatcgtttcccttgtcgggctgacaggaaacgcagttgtgctctggctcctgggctgccgcatgcgcaggaacgccttctccatctacatcctcaacttggccgcagcagacttcctcttcctcagcggccgccttatatattccctgtta

SEQ ID NO: 708 - DNA, 522 bp, Homo sapiens
atgtcgcctgaagaatggacgtatctagtggttcttcttatctccatccccatcggcttcctctttaagaaagccggtcctgggctgaagagatggggagcagccgctgtgggcctggggctcaccctgttcacctgtggcccccacactttgcattctctggtcaccatcctcgggacctgggccctcattcaggcccagccctgctcggtgtctgggctgaagcagacactgctggcggagtccgaggctctgaccagctacagccaccgggtgttctcggcctgggacttcggtctctgcggggacgtccacgtgcggctgcgccagcgcatcatcttgtacgaattaaaggtggagctggaggagacagtggtgcggcgccaggctgcggtgcggacgctgggccagcaagccagggtttggttggtgcgggtgctgctcaacctgctggtggtcgcgctcctgggggcagccttctatggcgtctactgggctacggggtgcaccgtggagctgcag

SEQ ID NO: 709 - DNA, 255 bp, Homo sapiens
aacgtaacctcctggagggattttgtcttcctgggcttctccagttctggggagttgcagctccttctctttgccttgttcctctctctgtatctagtcactctgaccagcaatgtcttcattatcatagccatcaggctggatagccatctgcacacccccatgtacctcttcctttccttcctatccttctctgagacctgctacactttgggcatcatccctagaatgctctctggcctggctgggggggac

SEQ ID NO: 710 - DNA, 759 bp, Homo sapiens
gctgttggccagattggaaacttcctggcttacacggcggtccccacggtcctggtaacccccctgggcgcccttggagtaccgttcgggtccattttagcttcctatctcctgaaggaaaagctcaacatcttgggcaagttggggtgcctgctaagctgtgcaggctccgtcgtgctgattatccactccccaaagtctgagagtgtgacaactcaggctgagctggaggaaaagctgaccaatccagtgtttgtgggctacctgtgcatcgtgctgctcatgctgctgctgctcatcttctggatcgcgccggcccatgggcccaccaacatcatggtctacatcagcatctgctccttgctgggcagtttcaccgtgccttccaccaagggcatcgggctggcggcccaagacatcttgcataacaacccgtccagtcagagagccctctgcctgtgcctggtactcctggccgtgctcggctgcagcatcatcgtccagttcaggtacatcaacaaggcgctggagtgcttcgactcctcggtgttcggggccatctactacgtcgtgtttaccacgctggtcctgctggcctcagccatcctcttccgggagtggagcaacgtgggcctggtggacttcttggggatggcctgtggattcacgaccgtctccgtggggattgtccttatacaggtgttcaaagagttcaatttcaaccttggggagatgaacaaatctaatatgaaaacagac

SEQ ID NO: 711 - DNA, 255 bp, Homo sapiens
aggacaaagcaggggccacggctctcccacggcatcctctatacagccatggaggctggagcagagatggaccaacaaaggggtccatctgccacaccccccatctacttcccttctgttgaagatgggaagccgcgccgctccctccgctgcacgcccaggcctgagcagcgaggccaccgggccgcgcgctcccagcttcgctcggacgcggcttcggcccgcagagggttcgtggcccggacgcggcgagag

SEQ ID NO: 712 - DNA, 255 bp, Homo sapiens
aaggccatcgcccagagtggcaccgccatttccagctggtctgtcaactaccagccgctcaagtacacgcggctgctggcagccaaggtgggctgtgaccgagaggacagtgctgaagctgtggagtgtctgcgccggaagccctcccgggagctggtggaccaggacgtgcagcctgcccgctaccacatcgcctttgggcccgtggtggatggcgacgtggtccccgatgaccctgagatcctcatgcagcag

SEQ ID NO: 713 - DNA, 255 bp, Homo sapiens
aacagctcaatggtgactgagtttatcttcatgggcatcacccaggaccctcagatggagatcatcttcttcgtggtcttcctcatagtttacctggttaatgtagtggggaatattggtatgattatcctgattacaacagacactcagcttcacacacccatgtattttttcctctgcaacctctcctttgttgacctgggctactcctcagccattgcccccaggatgctggctgacttcctaacaaatcac

SEQ ID NO: 714 - DNA, 255 bp, Homo sapiens
atgagacttatgaaagaggttcgaggcagaaatcaaacagaagtaacagaatttctcctcttaggactttccgacaatccagatctacaaggagtcctctttgcattgtttctgttgatctatatggcaaacatggtgggcaatttggggatgattgtattgattaagattgatctctgtctccacacccccatgtatttctttctcagtagcctctcttttgtagatgcctcttactcttcttccgtcactccc

SEQ ID NO: 715 - DNA, 897 bp, Homo sapiens
aacaagactgaagtcaccatgtttatattgacaggcttcacagatgattttgagctgcaagtcttcctatttttactattttttgcaatctatctctttaccttgataggcaatttagggctggttgtgttggtcattgaggattcctggctccacaaccccatgtattattttcttagtgttttatcattcttggatgcttgctattctacagttgtcactccaaaaatgttggtcaatttcctggcaaaaaataaatccatttcatttatcggatgtgcaacacagatgcttctttttgttacttttggaactacagaatgttttctcttggctgcaatggcttatgatcactatgtagccatctacaaccctctcctgtattcagtgagcatgtcacccagagtctatgtgccactcatcactgcttcctacgttgctggcattttacatgctactatacatatagtggctacatttagcctgtccttctgtggatccaatgaaattaggcatgtcttttgtgatatgcctcctctccttgctatttcttgttctgacactcacacaaaccagcttctactcttctactttgtgggttctattgagatagtcactatcctgattgtcctcatttcctgtgatttcattctgttgtccattctgaagatgcattctgctaagggaaggcaaaaggccttctctacatgtggctctcacctaactggagtgacaatttatcatggaacaattctcgtcagttatatgagaccaagttccagctatgcttcagaccatgacatcatagtgtcaatattttacacaattgtgattcccaagttgaatcccatcatctatagtttgaggaacaaagaagtaaaaaaggcagtgaagaaa

SEQ ID NO: 716 - DNA, 249 bp, Homo sapiens
tcagtcataccagtgaaggacaagaaacatctggaggtcaaactaggggagctgccaagctggatcttgatgcaggatcgagtcattgccgcagggattcaaagaggttactactggtactacaacaaatacatcaacgtgaagaaggggagcatctcggggctgaccatggtgctggcaggctacatgctcttccgatactgcctttcctacaaggagctcaagcacaagcggctatgcaggtaccac

SEQ ID NO: 717 - DNA, 255 bp, Homo sapiens
atggaagggaaaaatcaaaccaatatctctgaatttctcctcctgggcttctcaagttggcaacaacagcaggtgctactctttgcacttttcctgtgtctctatttaacagggctgtttggaaacttactcatcttgctggccattggctcggatcactgccttcacacacccatgtatttcttccttgccaatctgtccttggtagacctctgccttccctcagccacagtccccaagatgctactgaacatc

SEQ ID NO: 718 - DNA, 255 bp, Homo sapiens
atgtctcttgtcgtcaccagtatggtagctgtaattgtgtaccgcctgtcagtctttgctacatttgctagtttcatggaaagtgatgcatccttaaagcaggtcaaaagcttccttactcctcagataaccacatcactcacaggatcatgcttgaactttattgtcatcttgatcttgaatttcttttatgaaaagatatctgcctggatcacaaaaatggaaattcctcgaacataccaggagtatgagagc

SEQ ID NO: 719 - DNA, 903 bp, Homo sapiens
ctactcaatcaaacttctttagtgacatattttcggcttagaggtttatctgtaaatcataaggcacggatagctatgttttccatgttcctcattttttatgtcctgacactgattgggaatgttctcattgtcataactattatctatgaccaccggctccatactcccatgtatttcttcctcagcaacctgtcctttattgatgtctgccactccactgtcactgtccccaagatgctgagagacgtgtggtcagaggaaaagctcatctcttttgatgcctgtgtgacccagatgttcttcctgcacctctttgcctgcacagagatcttcctcctcaccgtcatggcctatgatcggtacctagcaatatgtcagcccctgcactacccagtgctcatgaatgggaggttatgcacagtccttgtggctggagcttgggtcgccggctccatgcatgggtctatccaggccaccttgaccttccgcctgccctactgtgggcccaatcaggtggattactttatctgtgacatccgcgcagtattgagactggcctgtgctgacacaactgtcaatgagcttgtgacctttgtggacgtcagggtagtggccgccagttgcttcatgttaattctgctctcctatgccaacatagtccatgccatcctgaagatacgcaccgctgatgggaggcgccgggccttctccacctgtggctcccacctaatcgtggtcacagtctactatgtcccctgtattttcatctaccttagggctggctccaaagaccccctggatggggcagcggctgtgttttacactgttgtcactccattactgaaccccctcatctatacactgaggaaccaggaagtgaagtctgccctgaagaggata

SEQ ID NO: 720 - DNA, 255 bp, Homo sapiens
atggtggtggcagggatggtgatgatgatggtggtggtgatgatggtggtggtggtggtgatggtagtagtcagtgatgatgatggtggtggtggtgatggtgatggtggtggtggtggtggtgatggtgatggtggtggtgatggtggtgatggtggtggtggtgatgacagtggtggtggtgatggtgatgatggtggtggtgatggtggtggtggtggtggtggtgatggtggtgatggtggtggtggtggt

SEQ ID NO: 721 - DNA, 453 bp, Homo sapiens
gttgcatcttccatccttggggtcttcgtcctaaccccatccctggccatgatgaacatccgtttcaaccatcctttgtatggatcttttgggactcaaattatccatattggtgccttccaaggtatggcccttttggtggctaaggtatttaacaagatggcctgtgtcctggccaggatggacaaggcagtcttcccaagtttggatgacattagcaaggccctggacaagcaggcttttaagtattacccgtctactcgcggcctgacttacactgttttacccagctgggtcaagaacttagcacagtatggaaagcccattaagaacatgtgcagagatgaccccacctactttgcccagcagcaaaaagaaggtactgccctggcaattgactccaattcttgttttgaaatccaacttctgtcctttatgggactcttcatctgc

SEQ ID NO: 722 - DNA, 255 bp, Homo sapiens
atggagctgggaggggctgtcaccatctttctggcactccgcttgtcttgcctgctcatcctcattgcctggaaacgaatggataaggcaggaaagctgcccccaggtcctacaccaattcttttcctggggcacctgctgcaagttcgaactgatgctacgtttcagtctttcatgaagggagaaatacagccctgtgttcactgtgtacatgggtcccggccagtggtggttttatgtggacacgaagcagtg

SEQ ID NO: 723 - DNA, 600 bp, Homo sapiens
atggccaacggcatgtgcagccagggcggcttcttcagcttcagctgcgtcatcttctccggcttcatcaagggagatctgcacaactggcagctcacagacgccgactacaaatgggccgagctggggtggtccaacgacacccacagctcgggctccctgggctctggagggtttgtgccttttggctttggcgtgattctccatggagcggccacgtgtttctttgcatttgtgggttttgatggcattgccaccacaggagaagaagccctccaccctcaccgcctccaccctcaccgctccatccccttgggcactgtgacctcgatcttcatctgcttcttggcctattttggtgtctcagcggcgctcaccctcatagtgcccctactacctgatatgtcccgagaaccccttgccggaggcttttgtccacattggatgggcccccatcagatatgctgtggccgtcggcaccctctgtgccctttcctccagtcaatggctgaggacaggctccttttctgcggactcgcccggatccacgcccacaccagcacccctgtggtggccactgtcgttgctgggacccttgca

SEQ ID NO: 724 - DNA, 255 bp, Homo sapiens
gtacccctctgtccttgtcgctgtcctccttcccatcccggtccagcccccgcagtgaccgcagccccttttgcagaggagggcgcactgcgcgtgcgcgggggcgaggaccgctgctccgggcgcgtggagctctggcacgcgggctcctggggcaccgtgtgcgacgatggctgggacctggcggacgcggaggtcgtgtgccgccagctgggctgtggtcgggccgtcgccgccctgggggccgccgccttt

SEQ ID NO: 725 - DNA, 255 bp, Homo sapiens
gctgtcctgggcctcagcctctgggctctcctgcaccctgggacgggggccccattgtgcctgtcacagcaacttaggatgaagggggactacgtgctgggggggctgttccccctgggcgaggccgaggaggctggcctccgcagccggacacggcccagcagccctgtgtgcaccaggttctcctcaaacggcctgctctgggcactggccatgaaaatggccgtggaggagatcaacaacaagtcggatctg

SEQ ID NO: 726 - DNA, 762 bp, Homo sapiens
ccctgggggccccctcggctgccagctgccagcgatgtcctccagcaggtgccctcctgccagactggggaaggctctgccacctttgccacccccagagaggcacctccagctgaaactgatgagccattgccaccaccactcattaccaccatcatcaccaccaccctccccatcaccaccaccactgccattgccaccaccatcatcaccaccaccattaccaccatccccatcaccactattaccaccaccatcaccaccaccattaccaccaccatcatcactaccgtcaccaccaccactaccattaccaccaccatcatcatcaccatcaccaccaccactaccattaccaccaccatcaccactaccatcattaccatcatcaccatcaccactaccatcattaccatcaccaccatcaccaccaccaccaccatcaccaccaccatcatcattaccaccaccaccatcaccactgccattaccactaccatcaccgtcacgaccaccattaccaccaccatcagcatcaccatcaccacagccaccagcaccaccattaccaccatcactaccaccatcaccactactatcaggctctgtggaaaacaggacctggaatggctcagtggctctcaatctgcaatcatgatccaggagcccctgaccaagtttcagaaaatcctagaagaagcgcacatgcgccccaagctgaagcacacaggaagcttgctcatccaggcactgaagtttatc

SEQ ID NO: 727 - DNA, 507 bp, Homo sapiens
acattcgtctcggccttcactgtgctgtgcggggcccgcaccgacctcccggacaggcatgtgtgctgcgtcttctggctgaacattgcagcagccctcatccaaatcctcactgccatcgtcatggtgggctggatcatgagcatcttctggggcatggacatggtcatccttgccactgggatcgtcagtgtcagaggtaagctgagccaggctacaaggagcagggcatcccacagcagctgtgagcccacgggagccgctggggagatccaggggggccctcaggttgtgagggctgccagcccctcctgctctggaaagcactgtgggcgcaggcaccagagcatcagagagtggggtggagatgagaacgcccacagagaggctgggatgctccggcaggctccaactggccttgctgtacccactgcccaccgcaaaggcacgccacgtctgctgggccgggccacaccgggccctgtctggctgaaatctgagggctgg

SEQ ID NO: 728 - DNA, 690 bp, Homo sapiens
atggagaaaccccgtctctaccaaaaatacaaaattagccgggtgtggtggcgtctgcctgtaatcccagctactggggaagcggaggacaatcgcttgaacccagaaggcagaggttgtggtgagccgagatctcgccattgcactccagcctggacaacaacagcgaaacttcatctcaaaacaataataagtttacaacctctgaatatgtaccaaatggagccaggggtggggagtattaggacaagccccgcactgcagagccccccagctctcactcgtggaccaagtgcatgggacacagccattcggaaagctctttcttttggagtgggtctgggtgttctggttttggtttgcttgttttatcattttgtgacattggcgcctattcttcagtttgcatccctgccttgcttgcttgaagctggagcacaaatgtcccgtcaccctgtaacaacacaagtatgcgtcatgcctgcgaggcttagcttgggaagtggaatctccaggaatctccttcggttgtctgtctgccactttacactgttgctcccatttcggtcactgaggccctgtcccttatcctccagggacatggtgctgtcctatgagctctggctcctttgtgacttttacattgctcctccagatagcagtggcagtggcatttgcaaaaaggctatt

SEQ ID NO: 729 - DNA, 255 bp, Homo sapiens
tctgcccaaggccgcccctttggacactctgaggaactccaagccaacaagatgcctctcattagtgacttctaccctgatgccgtgatggtggcctggaaggcagagggcaccaccatcaccctgggcatgaagactgccacaccctccaaacagagaaacacaacgatagcacagcacatgtggggaccaatgagaaatgagtctggggagaccacgggcttcagggagaatgtttcgatgaggcaagtacaa

SEQ ID NO: 730 - DNA, 675 bp, Homo sapiens
tcacatctatggcctggagggccaggactgcaagtacacccgatgttcgggcccgaggcttacaccctggtcctgcaccttactcagctcatcacgcaggccaagcacacggccaggtccatctcggaccagtgtgtggagactccagctggccactccttcctgttgtggctgggctttggccccacagacaccaacggctcctattcagccatgacctgggcgagatggggcaggacagcgtccagaagatggacgagtgcctggaggaggccctggagtacctgcgccagatattccgagtatgagcaatggggcctgttccacggccagcccacgctggccagcggccacaggctcaacctgcacttcctaggcagctacctgacactgccctggctactgctggctttcttcatggcctctctgttctgcatcaggcccctcacctgtgcactgctgttcaccctgggctacgccctctactccttggccatgatgttgctgaccaggtggggaagctgcaccagccctgatggcattggaggtgggaggccactccagtgccgccggtctgtgggtgtccagatcgaccagcagaggcagatcctggacttggacctgggcctgcagttcctacagcagcagtacttggagttgctggccaagctccac

SEQ ID NO: 731 - DNA, 255 bp, Homo sapiens
gccttcatgatcccgttcctcatcctgctggtcctggagggcatccccctgctgtacctggagttcgccatcgggcagcggctgcggcggggcagcctgggcgtgtggagctccatccacccggccctgaagggcctaggcctggcctccatgctcacgtccttcatggtgggactgtattacaacaccatcatctcctggatcatgtggtacttattcaactccttccaggagcctctgccctggagcgactgc

SEQ ID NO: 732 - DNA, 582 bp, Homo sapiens
gcccatgtaggccctggggccacagaatgcgggcaactgctgttcaaggaccagcatgagggggccagggccagggtgctgcttttgggaatgctgtacacttcagccattgtggcttttgtgttaacaattttgctgcagtattgccccttttttcttccacaacaggggaaagatgaagctgcagttctccaagaggagtcaggcaagaagcacccattgcagttggagcaacagctgatccaggcagagcagcacctggacaatctggtggccccgctggaccccctttttgagtgtgtgactactctggctggagccgtaagacttctgaacatgcagctacgaaccgtgaagctgctacaagatagcaagccagataagggtatggtggcttcagaaccagaggccagcataccttttcctgaggacttatgtataaaggaagatgaggaggaggctgctgatggtcagacctgggaggagcccataaactggagcacagagacatggaaactagctacttcctggcaggtggaacaggtgctaaggagaagatgcagcaaggctgtggaaaagggc

SEQ ID NO: 733 - DNA, 246 bp, Homo sapiens
ataccagtgaaggacaagaaacttctggaggtcaaactgggggagttgccaagctggatcttgacgcgggacttcagccctagtggcattttcggagcatttcgaagaagttactaccggtactacaacaagtacatcaatgtgaagaaggggagcatctcgggggttaccatggtgctggcatgctacgtgatcttcagctactgcctctcctacaagcatctcaagcacgagcggctccgcaaa

SEQ ID NO: 734 - DNA, 660 bp, Homo sapiens
gcaaggagcaggacacagtgggaaatgacctggattggacggcagggctctggcattgcaactccaactaacagcctgtgcatctttgcacagctgtttcttagaatcttcatctatgctctgagagatgaattaggcaaacctgcagggatagcaggcaccgccttaagccttctaattcgagcagaattaggccagccgggaactctgctaggagatgatcagatctacaatgttattgttaccgccctcacatccgttataatcttttttatggtaataccaatcatgattgggggtttcggcaactggctagtccctctgcttgtcaaaaggtttttccctggggtcatggaacaagaacctgattcagtgaccttcttgtccttcacctttctccagtgtgggtctctcactagtccactgcgtcccccatgcactacggaacttgcatcagagcatcccttaccagatgtaagcttgttctgggcaccagacatctttcatacgctggaaggttcccgggagaactctggagccaattacatcatcgtgctcccaggagtgttgcaacataaacttccatttacaaatgaggccacagagtcaccaagaggtcaaatggcacgtttagtcttcatggagcatctcagccaagtt

SEQ ID NO: 735 - DNA, 528 bp, Homo sapiens
atgtgtctcgagctcttccactccagcaatgtcatcgacgggctcaagctcaatgccttcgcggctgtcttcacggtgctctcaggcctcctgggaatggtcgcccacatgatgtacacgcaggtgttccaggtcaccgtgagcctcggtcctgaggactggagaccccattcctgggactacgggtggtccttctgcctggcgtggggctcctttacctgctgcatggcagcctctgtcaccacgctcaactcctacaccaagacggtcattgagttccggcacaagcgcaaggtctttgagcagggctaccgggaagagccgaccttcatagaccctgaggccatcaagtacttccgggagaggatggagaagagggacgggagcgaggaggactttcacttagactgccgccacgagagataccctgcccgacaccagccacacatggcggattcctggccccggagctccgcacaggaagcaccagagctgaaccgacagtgctgggtcttggggcactgggtg

SEQ ID NO: 736 - DNA, 255 bp, Homo sapiens
cacagtagtgatccaacagagttcgtcctggcagggctcccaaatctcaacagcgcaagagtggaattattttctgtgtttcttcttgtctatctcctgaatctgacaggcaatgtgttgattgtgggggtggtaagggctgatactcgactacagacccctatgtacttctttctgggtaacctgtcctgcctagagatactgctcacttctgtcatcattccaaagatgctgagcaatttcctctcaaggcaa

SEQ ID NO: 737 - DNA, 255 bp, Homo sapiens
gagtacaagtccatgggaatgtccaacctgacaagactctctgaatttattctcttgggactctcctctcggtctgaagaccagaggccactctttgccctctttcttatcatatacctggtcactttgatgggaaatctgctcatcatcttggctatccactctgatcctcgacttcaaaaccctatgtattttttcctaagcatcttgtcctttgctgatatttgctacacaacagtcatagtcccaaagatg

SEQ ID NO: 738 - DNA, 885 bp, Homo sapiens
tttttgctccttgggttctcgagagctaacatctcctacactctcctcttcttcctgttcctggctatttacctgaccaccatactggggaatgtgacactggtgctgctcatctcctgggactccagactgcactcacccatgtattatctgcttcgtggcctctctgtgatagacatggggctatccacagttacactgccccagttgctggcccatttggtctctcattacccaaccattcctgctgcccgctgcttggctcagttctttttcttctatgcatttggggttacagatacacttgtcattgctgtcatggctctggatcgctatgtggccatctgtgaccccctgcactatgctttggtaatgaatcaccaacggtgtgcctgcttactagccttgagctgggtggtgtccatactgcacaccatgttgcgtgtgggactcgtcctgcctctttgctggactggggatgctgggggcaacgttaaccttcctcacttcttttgtgaccaccggccacttctgcgagcctcttgttctgacatacattctaatgagctggccatattctttgagggtggcttccttatgctgggcccctgtgccctcattgtactctcttatgtccgaattggggccgctattctacgtttgccttcagctgctggtcgccgccgagcagtctccacctgtggatcccacctcaccatggttggtttcctctacggcaccatcatttgtgtctacttccagcctcccttccagaactctcagtatcaggacatggtggcttcagtaatgtatactgccattacacctttggccaacccatttgtgtatagcctccacaataaggatgtcaagggtgcactctgc

SEQ ID NO: 739 - DNA, 255 bp, Homo sapiens
atgaatgagacaaatcattctcgggtgacagaatttgtgttgctgggactgtctagttcaagggagctccaacctttcttgtttcttacattttcactactttatctagcaattctgttgggcaactttctcatcatcctcactgtgacctcagattcccgccttcacacccccatgtactttctgcttgcaaacctgtcatttatagacgtatgtgttgcctcttttgctacccctaaaatgattgcagacttt

SEQ ID NO: 740 - DNA, 93 bp, Homo sapiens
cttggagttctcataattcttctttccaccatggtaacttctattactgggttgtcaacttctgcgatagcaactaacgggtttgttcgtgga

SEQ ID NO: 741 - DNA, 891 bp, Homo sapiens
ttctatctattgggcatcccctctctgccagagaccttcttcctccctgtgttttttattttcctcctcttctaccttctcatcctgatgggtaatgccctgatcctggtggccgtggtggcagagcccagcctccacaagcccatgtacttctttctgatcaatctctccaccttggacatccttttcaccacaaccactgtccccaagatgctgtccttattcttgcttggggaccgcttcctcagcttttcttcctgcttactgcagatgtacctcttccaaagttttacatgttcagaagccttcatcctggtggtcatggcctatgaccgctatgtggctatctgccacccactgcactaccctgtcctcatgaacccacagaccaatgctaccttggcagccagtgcctggctaactgccctcctcctgcccatcccagcagtagtaaggacctcccagatggcatataacagcattgcctacatctaccactgcttctgtgatcatctggctgtggtccaggcctcctgctctgacaccaccccccagaccctcatgggcttctgcatcgccatggtggtgtccttcctcccccttctcctggtgcttctctcctatgtccacatcctggcctcagtgcttcgcatcagttccctagaaggacgggcaaaagccttctccacctgcagctcccaccttctggtcgtgggcacctactactcatctattgccatagcctacgtggcctacagggctgacctgccccttgacttccatatcatgggcaatgtggtatatgccattctcacaccaattctcaaccccctcatttacacgctgagaaacagggatgtaaaggcagccatcaccaaaatcatgtctcaa

SEQ ID NO: 742 - DNA, 219 bp, Homo sapiens
gtttgtgtgctggagaggcaaatatttgacttccttggatatcagtgggcacctatcctggcaaattttgtacatattattatcgtcattcttggtttgtttggaactattcaatatagacctcgttacataacaggatatgctgtctggctagtcctctgggttacgtggaatgtgtttgttatctgcttctatttggaggctggggacctctcaaag

SEQ ID NO: 743 - DNA, 255 bp, Homo sapiens
cgctgtcacaccgactgcctagaggggctgctgtcccgcaccttccagtggctggggtggcaggtgggcgcgcacccctggatcttcctgctggcgcccttgatgctgacagccgcgctgggcaccggcttcctgtacctacccaaggacgaagaggaagacctagaggagcattacacccctgtggggagcccggccaaggcggagcggcgcttcgtgcagggccatttcaccaccaacgactcctaccgcttc

SEQ ID NO: 744 - DNA, 198 bp, Homo sapiens
atgagcatatgcatatgggtgaatgtttgtgtgcccatgagtatatgcatacgggtgaatgtttgtgtgcccatgagtatatgcatatgggtatatgtttgtgtgcccgtgattatatgcatatgggtgaatgtttgtgtgcccgtgattatatgcatgtgggtgaatgttcatgaacacaaacagctacactcggag

SEQ ID NO: 745 - DNA, 903 bp, Homo sapiens
aatcactcagaaatgactgacttcattcttgcaggcttcagggtacgcccagagctccacattctcctcttcctgctatttttgtttgtttatgccatgatccttctagggaatgttgggatgatgaccattattatgactgatcctcggctgaacacaccaatgtattttttcctaggcaatctctccttcattgatcttttctattcatctgttattgaacccaaggctatgatcaacttctggtctgaaaacaagtctatctcctttgcaggctgtgtggcccagctctttctctttgccctcctcattgtgactgagggatttctcctggcggccatggcttatgaccgctttattgccatctgcaaccctctgctctactctgttcaaatgtccacacgtctgtgtactcagttggtggctggttcctatttttgtggctgcattagctcagttattcagactagcatgacatttactttatctttttgcgcttctcgggctgttgaccacttttactgtgattctcgcccacttcagagactgtcttgttctgatctctttatccatagaatgatatctttttccttatcatgtattattatcttgcctactatcatagtcattatagtatcttacatgtatattgtgtccacagttctaaagatacattctactgagggacataagaaggccttctccacctgcagctctcacctgggagttgtgagtgtgctgtatggtgctgtcttttttatgtatctcactcctgacagatttcctgagctgagtaaagtggcatccttatgttactccctagtcactcccatgttgaatcctttgatttactctctgaggaacaaagatgtccaagaggctctaaaaaaatttctagagaag

SEQ ID NO: 746 - DNA, 537 bp, Homo sapiens
cgccagctgaagctgcccttgctctctgacccaatttccaccagatctaaacgttcatgcaggcgggccccggggtcccagaggtctggacggatgctgcgaagcccccatagcaacgcacctaattcctcactcctaaaattggtccttatcgtgtccattgcagtttccagcgcattccagtttgctggcgtgattcactggatcagcctggtcattctgtccgtgttcttctcagagactgttctacggattgtggtgcttgggatctgggattacatcgaaaacaaaatagaggtgtttgacggggctgtgatcatcctatctttggctccgatggtggcatccactgtggccaatggacccaggagcccctgggacgccatcagcctcatcatcatgctccggatctggagggtgaagagggtcattgatgcctacgtcctgccagtgaagctggagatggagatggttatccagcagtacgagaaggccaaggtcatccaagacgagcagctggagaggctgacgcagatc

SEQ ID NO: 747 - DNA, 561 bp, Homo sapiens
acactttgtcctccaaaaggaagacagacttcacgtcattcatctgttcaatactcttccgaacaacaggaaattttgccagctaatgattctcttgcttacagtgactcagctggtagctttttaaaagaagtagaccgagacatagaacaaatagtaaagtgtacagacaataagagagagaacctcaatgaggtagtatcggccttaacagcacaacaaatgcgttttgaacctgataacaaaaacactcaacgtaaagacccctattatggagcagactggggaatagggtggtggacagctgtagtgataatgttgatagtaggtataataacaccagtgttttatttgttgtattatgaaattttagctaaggtggatgttagtcatcattcaacagtggactcttcacatttacattcaaaaatcacacccccatcacagcagagagaaatggaaaatggaattgtgccaactaaaggaatacatttcagccaacaagatgatcataaactgtatagtcaagattctcagtcacctgctgctcaacaggaaaca

SEQ ID NO: 748 - DNA, 399 bp, Homo sapiens
gctgaagaaaaatgggatgaaccttggtataaccaaaaaacagaacatcaaagaaatagcagtaagattctgagatttatttcagacttccttgcttttttggttctctacaatttcatcattccaatttcattatatgtgacagtcgaaatgcagaaatttcttggatcattttttattggctgggatcttgatctgtatcatgaagaatcagatcagaaagctcaagtcaatacttccgatctgaatgaagagcttggacaggtagagtacgtgtttacagataaaactggtacactgacagaaaatgagatgcagtttcgggaatgttcaattaatggcatgaaataccaagaaattaatggtagacttgtacccgaaggaccaacaccagactct

SEQ ID NO: 749 - DNA, 255 bp, Homo sapiens
caatcgtacatctttgtggagagctcacacatcagggatgccctcacctggctttcacagggacaaaaggcagatggttttttcgaaggctctggatcactgctgaacaatgccattaagcacgcagtggtctgcagtgccctatcctgccttgaaacggcctggagctccacctcagaggcccaaggaagtgttgtctataccaaagcattattggcctatgcctttgccctagcaggaaacaaagtcaagcga

SEQ ID NO: 750 - DNA, 393 bp, Homo sapiens
atggcgccgtcgctgtggaaggggctggtgggcatcggtctctttgccctagcccacgccgccttttccgctgcgcagcatcgttcttatatgcgattaacagaaaaagaagatgaatcactgccaatagatatagttcttcagacacttctggcctttgcagttacctgttacggtatagttcatattgcaggagagtttaaagacatggatgccacttcagaactgaaaaataagacatttgatacgttaaggaatcacccatccttttatgtatttaatcatcgtggtcgagtacttttccggccttcggatacagcaaattcttcaaaccaagatgcattgtcctctaacacatcattgaagttacgaaaactcgaatcactgcgtcgt

SEQ ID NO: 751 - DNA, 876 bp, Homo sapiens
atgggatgtcaggttgtaggcctggcggccagtgcccctgctggcacctgtgtgctcaccttcctggttatctttgcagactgcagccagcccctggacgtgatccttctcctggatggctcctccagtttcccagcttcttcttttgatgaaatgaagagttttgctaaggctttcatttcaaaagccaatatagggcctcctctcactcaggggtcagtgctccagtatggaagcatcaccaccattgacgtgccatggaacgtggccccggagaaagcccatttgctgagccttgtggacgtcatgcagcgggagggaggccccagccaaatcggtaacgttggggatgccttgggctttgctgtgcgacacttgacttcagaaatgcatggtgccaggccgggagcctcgaaggcggtggtcatcctggtcacggatgtctctgtggattcagtggatgcagcagctgatgccgccaggtccaacagagtgacagtgttccctgttggaattggagatcgctacgatgcagcccagctacggatcttggccggcccagcaggcgactccaacatggtgaagctccagcaaatcgaagacctccctaccatggtcaccttgggcaattccttcctccacaaactgtgctctcgatttgttaggattcgcatggatgaggatgggaatgagaagaggcccggggacgtctggaccttgccagaccagtgccacaccgtgacttgccagccagatggccagaccttgctgaagagtcatcgggtcaactgtgaccgggggccgaggccttcatgccctaacagccagtcccctgttaaagtggaagacacctgtggctgccgctggacctgcccc

SEQ ID NO: 752 - DNA, 414 bp, Homo sapiens
gctccacccactggcatgcccagcaggaacactataaagccaggctcagcccagctcccagccaagcacctgcctggcaacatggggtccagcagcttcttggtcctcatggtgtctctcgttcttgtgaccctggtggctgtggaaggagttaaagagggtatagagaaagcaggggtttgcccagctgacaacgtacgctgcttcaagtccgatcctccccagtgtcacacagaccaggactgtctgggggaaaggaagtgttgttacctgcactgtggcttcaagtgtgtgattcctgtgaaggaactggaagaaggaggaaacaaggatgaagatgtgtcaaggccataccctgagccaggatgggaggccaagtgtccaggctcctcctctaccaggtgtcctcagaaa

SEQ ID NO: 753 - DNA, 255 bp, Homo sapiens
ggctgtgctgcaggctccgagctggccttcgtgcaggagctgggggacacagtggctgtgtgggagcacccactggtgctgccctgccaggtggagggtgagccgcctgtgtccatttcctggcagcgggataggctggccttagccaatgagagtggtgtcaccctgatgccagatggctccctgcacctggccgccctgccttcccgccggagcctcccttcccgtgcccacgagtaccactgcgtggcccag

SEQ ID NO: 754 - DNA, 255 bp, Homo sapiens
atgatgctcaggttttccatgtgcaggggaaatgatgaaggttttgcaatggaacaaatatggttgctgctgcttctaacaattagagtgcttccggggtctgctcagttcaacggctacaactgtgatgccaacctccacagtagatttcctgctgaaagagacatcagtgtctattgtggagtgcaggctattacgatgaagattaatttttgcacggtacttttctcgggttattcggaaacagatctggca

SEQ ID NO: 755 - DNA, 255 bp, Homo sapiens
atggatcatgctgaagaaaatgaaatccttgcagcaacccagaggtactatgtggaaaggcctatctttagtcatccggtcctccaggaaagactacacacaaaggacaaggttcctgattccattgcggataagctgaaacaggcattcacatgtactcctaaaaaaataagaaatatcatttatatgttcctacccataactaaatggctgccagcatacaaattcaaggaatatgtgttgggtgacttggtc

SEQ ID NO: 756 - DNA, 255 bp, Homo sapiens
gagccatggaatctcacaggtatctcagaattcctcctcctgggactctcagaggatccagaactgcagcccgtcctccctgggctgtccctgtccatgtacctggtcacggtgctgaggaacctgctcatcatcctggctgtcagctctgactcccacctccacacccccatgtgcttcttcctctccaacctgtgctgggctgacatcggtttcacctcggccatggttcccaagatgattgtggacatgcag

SEQ ID NO: 757 - DNA, 255 bp, Homo sapiens
atggagcagagcaattattccgtgtatgccgactttatccttctgggtttgttcagcaacgcccgtttcccctggcttctctttgccctcattctcctggtctttttgacctccatagccagcaacgtggtcaagatcattctcatccacatagactcccgcctccacacccccatgtacttcctgctcagccagctctccctcagggacatcctgtatatttccaccattgtgcccaaaatgctggtcgaccag

SEQ ID NO: 758 - DNA, 909 bp, Homo sapiens
aatcagaccttcaactctgacttcatcctcctgggaatcttcaatcacagccccacccacaccttcctcttctttctggtcctggccatcttttcagtggccttcatgggaaactctgtcatggttctcctcatctacctggacacccagctccacacccccatgtacttcctcctcagtcaactgttcctcatggacctcatgctcatctgctctaccgtacccaagatggccttcaactacttgtctggcagcaagtccatttctatggctggttgtgccacacaaattttcttctatgtatcactgcttggctccgaatgctttctgttggctgttatgtcttatgaccgctatattgccatttgccaccctctaagatacaccaatctcatgagacccaaaatttgtggacttatgactgccttctcctggatcctgggctctatggatgcaatcattgatgctgtagcgacattttccttctcctactgtgggtctcgggaaatagcccacttcttctgtgacttcccttccctactaatcctctcatgcaatgacacatcaatatttgaaaaggttcttttcatctgctgtatagtaatgattgtttttcctgttgcaatcatcatcgcttcctatgctcgagttattctggctgtcattcacatgggatctggagagggtcgtcgcaaagcttttactacctgttcctctcacctcatggtggtgggaatgtactatggagcaggtttgttcatgtacatacggcccacatctgatcgctcccctatgcaggacaagctggtgtctgtattctacaccatcctcactcccatgctgaatcccctcatctacagcctccgcaacaaggaggtgaccagagcactcaggaaagtgttaggaaag

SEQ ID NO: 759 - DNA, 255 bp, Homo sapiens
atggagccccaaaatacctccactgtgactaactttcagctgttaggattccagaaccttcttgaatggcaggccctgctctttgtcattttcctgctcatctactgcctgaccattatagggaatgttgtcatcatcaccgtggtgagccagggcctgcgactgcactcccctatgtacatgttcctccagcatctctcctttctggaggtctggtacacgtccaccactgtgccccttctcctagccaacctg

SEQ ID NO: 760 - DNA, 894 bp, Homo sapiens
aacgccagcctcgtgacagcattcatcctcacaggccttccccatgccccagggctggacgccctcctctttggaatcttcctggtggtttacgtgctcactgtgctggggaacctcctcatcctgctggtgatcagggtggattctcacctccacacccccatgtactacttcctcaccaacctgtccttcattgacatgtggttctccactgtcacggtgcccaaaatgctgatgaccttggtgtccccaagcggcagggctatctccttccacagctgcgtggctcagctctattttttccacttcctggggagcaccgagtgtttcctctacacagtcatgtcctatgatcgctacttggccatcagttacccgctcaggtacaccagcatgatgagtgggagcaggtgtgccctcctggccaccggcacttggctcagtggctctctgcactctgctgtccagaccatattgactttccatttgccctactgtggacccaaccagatccagcactacttctgtgacgcaccgcccatcctgaaactggcctgtgcagacacctcagccaacgtgatggtcatctttgtggacattgggatagtggcctcaggctgctttgtcctgatagtgctgtcctatgtgtccatcgtctgttccatcctgcggatccgcacctcagatgggaggcgcagagcctttcagacctgtgcctcccactgtattgtggtcctttgcttctttgttccctgtgttgtcatttatctgaggccaggctccatggatgccatggatggagttgtggccattttctacactgtgctgacgccccttctcaaccctgttgtgtacaccctgagaaacaaggaggtgaagaaagctgtgttgaaa

SEQ ID NO: 761 - DNA, 255 bp, Homo sapiens
ctgcaaagtggaaaccagacttctgtgtctcacttcattttggtgggcctgcaccacccaccacagctgggagcgccactcttcttagctttccttgtcatctatctcctcactgtttctggaaatgggctcatcatcctcactgtcttagtggacatccggctccatcgtcccatgtgcttgttcctgtgtcacctctccttcttggacatgaccatttcttgtgctattgtccccaagatgctggctggcttt

SEQ ID NO: 762 - DNA, 255 bp, Homo sapiens
atgaatccagcaaatcattcccaggtggcaggatttgttctactggggctctctcaggtttgggagcttcggtttgttttcttcactgttttctctgctgtgtattttatgactgtagtgggaaaccttcttattgtggtcatagtgacctccgacccacacctgcacacaaccatgtattttctcttgggcaatctttctttcctggacttttgctactcttccatcacagcacctaggatgctggttgacttg

SEQ ID NO: 763 - DNA, 906 bp, Homo sapiens
agaaatggcacagtaatcacagaattcatcctgctaggctttcctgttatccaaggcctacaaacacctctctttattgcaatctttctcacctacatattaacccttgcaggcaatgggcttattattgccactgtgtgggctgagcccaggctacaaattccaatgtacttcttcctttgtaacttgtctttcttagaaatctggtacaccaccacagtcatccccaaactgctaggaacctttgtagtggcaagaacagtaatctgcatgtcctgctgcctgctgcaggccttcttccacttcttcgtgggcaccaccgagttcttgatcctcactatcatgtcttttgaccgctacctcaccatctgcaatccccttcaccaccccaccatcatgaccagcaaactctgcctgcagctggccctgagctcctgggtggtgggcttcaccattgtcttttgtcagacgatgctgctcatccagttgccattctgtggcaataatgttatcagtcatttctactgtgatgttgggcccagtttgaaagccgcctgcatagacaccagcattttggaactcctgggcgtcatagcaaccatccttgtgatcccagggtcacttctctttaatatgatttcttatatctacattctgtccgcaatcctacgaattccttcagccactggccaccaaaagactttctctacctgtgcctcgcacctgacagttgtctccctgctctacggggctgttctgttcatgtacctaagacccacagcacactcctcctttaagattaataaggtggtgtctgtgctaaatactatcctcaccccccttctgaatccctttatttatactattagaaacaaggaggtgaagggagccttaagaaaggcaatg

SEQ ID NO: 764 - DNA, 255 bp, Homo sapiens
atgtcatacggatccatcgcccgtggaggtggcctggggagccgtggccctctcgggggaccttcgagacaaggctgtcagcccctagagtgcgctagatgttggaccgagtatggaatccgccatttcccctgcccgtcgccagagagcaagctgcagaacccctgtgtggggaaggacggggaaggtgatctggggccagcaggcacgcctattgtcccaagggccaggaagcgagggcctggggttgcccct

SEQ ID NO: 765 - DNA, 255 bp, Homo sapiens
tgggtgaaccagtcctacacagatggcttcttcctcttgggcatcttttcccacagccagactgaccttgtcctcttctctgcagttatggtggtcttcacagtggccctctgtgggaatgtcctcctcatcttcctcatctacctggacgctggacttcacacccccatgtacttcttcctcagccagctctccctcatggacctcatgttggtctgtaacattgtgccaaagatggcagccaacttcctgtct

SEQ ID NO: 766 - DNA, 906 bp, Homo sapiens
gtgacagagttcatccttttgggaatcccacacacagaggggctggagatgacactttttgtcttattcttgcccttctatgcctgcactctactgggaaatgtgtctatccttgttgctgttatgtcttctgctcgccttcacacacctatgtatttcttcctgggaaacttgtctgtgtttgacatgggtttctcctcagtgacttgtcccaaaatgctgctctaccttatggggctgagccgactcatctcctacaaagactgtgtctgccagcttttcttcttccatttcctcgggagcattgagtgcttcttgtttacggtgatggcctatgaccgcttcactgccatctgttatcctctgcgatacacagtcatcatgaacccaaggatctgtgtggccctggctgtgggcacatggctgttagggtgcattcattccagcatccttggatctacaattcataccagttttatgttgagactctttttgtgcaagactaatgtgattaaccattatttttgtgatcttttccctctcttggggctctcctgctccagcacctacatcaatgaattactggttctggtcttgagtgcatttaacatcctgatgcctgccttaaccatccttgcttcttacatctttatcattgccagcatcctccgcattcactccactgagggcaggtccaaagccttcagcacttgcagctcccacatcttggctgttgctgttttctttggatctgcagcattcatgtacctgcagccatcatctgtcagctccatggaccagaggaaagtgtcgtctgtgttttatactactattgtgcccatgctgaaccccctgatctacagcctgaggaataaagatgtcaaacttgccgtgaagaaaattctg

SEQ ID NO: 767 - DNA, 888 bp, Homo sapiens
atgtttggagaaatagccaaactaatttccatctacagctataaccacgtgctctgccactcctactgtttccaccctgatgtgatgaaactctcatgttcagacacaaagatcaacagtgcactacgattaagtgcaatcatctctactgccggagtggactccatctttatcttgctctcctatctgctgatcattcgctcaggtctcagcattgcatccccagaggagaggaagaaggccttcagcacctgcatttctcatatcactgctgttggcatattctacatccctttgatcagcctgtcctttgttcacagatttggaaaacatgccccaccctatgtgcccacccccattgctaacttatatatcaactcagctatagtgacaacagataagaaaatcaagaaacaagatcagaagtgtaaacctagactagaaaaaactctagcaagtcatgtgctccatcattcctactgtttccatcctgatatcatccagctgtcatgttctgacaataagatcaacagtgttttaggactcactgccctcatagttactgcaggagtggactccatctttattcttctctcctatatcctgattattaagaccgtcctaagcattgcttccccagaggagcggcataaggtctttagcacttgtatctcctacataggtgctgttgccattttctacatccctctcattagtttgtgctttgtccataggtttgggaaaagagcgcctccttatgcccacactcttatggccaatgcatatttgcttattccaccagtgatgaatcctattatttatagtgtgaaaaccaagcagatccgtagggccattaaaaaaatcctttttcccaaggaatctgtgttg

SEQ ID NO: 768 - DNA, 759 bp, Homo sapiens
ctgccctcagtcagcctcctgaccgcagtggccctggcgcgccttgccaccaggaccaggaggccctcctactactaccttctggcgctcacagcctcggatatcatcatccaggtggtcatcgtgttcgcgggcttcctcctgcagggagcagtgctggcccgccaggtgccccaggctgtggtgcgcacggccaacatcctggagtttgctgccaaccacgcctcagtctggatcgccatcctgctcacggttgaccgctacactgccctgtgccaccccctgcaccatcgggccgcctcgtccccaggccggacccgccgggccattgctgctgtcctgagtgctgccctgttgaccggcatccccttctactggtggctggacatgtggagagacaccgactcacccagaacactggacgaggtcctcaagtgggctcactgtctcactgtctatttcatcccttgtggcgtgttcctggtcaccaactcggccatcatccaccggctacggaggaggggccggagtgggctgcagccccgggtgggcaagagcacagccatcctcctgggcatcaccacactgttcaccctcctgtgggcgccccgggtcttcgtcatgctctaccacatgtacgtggcccctgtccaccgggactggagggtccacctggccttggatgtggccaatatggtggccatgctccacacggcagccaacttcggcctctactgctttgtcagcaagactttccgg

SEQ ID NO: 769 - DNA, 870 bp, Homo sapiens
tttttgttggtaggaattcctggtttggaacacctgcatgcctggatctccatccccttctgctttgcttatactctggccctgctaggcaactgtacccttctcttcattatccgggctgatgcagccctccatgaacccatgtacctctttctggccatgttggcaaccattgacttggttctttcttctacaacgctgcccaaaatgcttgccatattctggttcagggatcaggagatcaacttctttgcctgtctggtccagatgttcttccttcactccttctccatcatggagtcagcagtgctgctggccatggcctttgaccgctatgtggccatctgcaagccattgcactacacgacggtcctgactgggtccctcatcaccaagattggcatggctgctgtggcctgggctgtgacactaatgactccactccccttcctgctcagacgcttccactactgccgaggcccagtgattgcccattgctactgtgaacacatggctgtggtaaggctggcgtgtggggacactagcttcaacaatatctatggcattgctgtggccatgtttattgtggtgttggacctgctctttgttatcctgtcttatgtcttcatccttcaggcagttctccagcttgcctctcaggaggcccgctacaaggcatttgggacatgtgtgtctcacataggtgccatcctgtccacctacactccagtagtcatctcttcagtcatgcaccgtgtagcccgccatgctgcccctcgtgtccacatactccttgctattttctatctccttttcccacccatggtcaatcctatcatatatggagtcaagaccaagcagattcgtgag

SEQ ID NO: 770 - DNA, 900 bp, Homo sapiens
cagaacccaacctcctttctgctcatgggaattccaggcccggaggcatcccacttttggattgcttttcccttctgctccatgtatgccctggcagtgctgggaaacatggtggtgctgctagtggtacattcagagcctgtattgcaccagcccatgtacctgttcctctgcatgctatccaccattgacctggtcctctgcacctccactgtgcccaagctccttgcacttttttgggcaaaggatgctgagatcaactttggggcctgtgctgcccagatgttctttatccatggcttctcagctgtagaatctggtatactgctagcaatggcctttgaccgctacttagccatttgctggcctctgcactatgggtcattgctctccccagagtctgtaggcaagctgggggctgcagccgtgcttcgtggtttgggactcatgaccccactcacctgcttactggcaagactgagctactgcagtcgagtggtggcccactcctactgtgaacacatggctgtggtaaagctggcttgtggaggaacacagccaaacaacatctatggcatcactgctgccacactggtggtgggcactgactccatctgtattgctgtctcctatgcactcatcctccgagctgtgttaggtctttcctccaaggaggcaagggctaagacctttggcacttgtggctcccacctgggtgtcatacttctcttctacacaccaggactcttctccttctacacacagcggtttggccagcacgtgccccggcacatccacatccttctagctgacctctacctggttgtgccacccatgctcaaccccatcatctatggcatgaagaccaaacagatctgggatggggccctccggcttctg

SEQ ID NO: 771 - DNA, 543 bp, Homo sapiens
atgcagggtcagggtgctttgaaagagtcacacattcaccttccaacagagcagcctgaggcttccctagtcttgcagggtcaacttgctgaaagctcagcccttggccccaaaggagctctgaggccgcaggcccagagccccgatgtccccgtgagctggtggcagggaagcggaaaaaggctttcacaccgcctcccccacatatgctcacagcctcccctgggccctttcttgcctctcacatggccatcctgtgggttctttggcctgggaggtgctgcttcagcctccctcggccttgaggtgctccaagacagcgtcagcacctgggctagaggtccgtgctgccctgtgcatcctcagagtttgactgtagtgtgcatgtgtgcatgcatgtgcgtgtgtgtgcatgtgtgtgcttgtgtatatgtgtgcatgtgtgtgcttgtgtgcatgtgtgcatgcgcatgtatgcgtgcgcaccgttattttctaatggactgtgcaggcatctgttctcctcatggaccaggaactcag

SEQ ID NO: 772 - DNA, 255 bp, Homo sapiens
gtgctgcagctgtttctgtctcgaacggcccagcggagtgcccttctgagcagcgggcggctgctgcggcgcctggggctgctcctgctacctgtgctgggcttcctggctgtgtggaccgtgggcgccctggagcgaggcatccagcacgcacctctggtgatccgaggccacactcccagtggccgccatttctacctctgtcaccacgaccgctgggactacatcatggttgtggctgagctgctgctgctg

SEQ ID NO: 773 - DNA, 366 bp, Homo sapiens
ctcttcactcctgccaacatcggccatccccctaactatgagatgctcaaggaggagcaagaggtggctgtgctgggggcaccccacaaccctgctcccccaatgtccaccgtgatccccatccacagcgagaactccgtgcccgaccatgtcgtctggtccctgttcaacacccacttcatgaactcctgctgcctgggcttcatagcattggcctactccgtgaagtctagggacaagaagatggttggcgacctgatcagggcccaggcctatgcctttaccgccaagtgcctgaacatctgggccctgattgtgcgcatcattacgaccattctgctcagcatcatcccagtgttgatcttt

SEQ ID NO: 774 - DNA, 255 bp, Homo sapiens
cccgacgggggctggggatgggtggtggtgctctcagcgttcttccagtcggcgcttgtgtttggggtgctccgctcctttggggtcttcttcgtggagtttgtggcggcgtttgaggagcaggcagcgcgcgtctcctggatcgcctccataggaatcgcggtgcagcagtttgggagcccggtaggcagtgccctgagcacgaagttcgggcccaggcccgtggtgatgactggaggcatcttggctgcgctg

SEQ ID NO: 775 - DNA, 888 bp, Homo sapiens
atgggcttcacgaggtcaattcctgactactttgctgtgaatcgcacaacccacacagtgatgcagcttcacatacagcttgggaagcacataggcatcgaagatgcttatttcagaaatgtccctgactgttgcagcctccactatgtttcaaatgacgaatttcttaatggccttgtccttgggcacgcattgggcacagttcgtgcagcaaataagctgcatgtggccatggcccattttggcacgaccattgttccttcttttctttgtcgtcttggagccccacgcaccgccgctcggaactacacttcccggcagaacgcgggcgcgcgcacgcgcaccggggcctcagccatggcgaccgtgctgtccagggcgctcaagctgccggggaagaagagcccagacctaggggagtatgatccacttacccaggctgacagtgatgagagcgaagacgatctggtgcttaacctgcagaagaatggaggggtcaaaaatgggaagagtcctttgggagaagcgccagaacccgactcagatgctgaggttgcagaggctgcaaagccacatctttcagaagtcaccacggagggctacccctcagaaccccttgggggcctggaacagaaggcggcctcctccctggtgtcatatgtgcgcacgtctgtcttcctgctgactttggggatctcgatgatcctggtgctcctgtgtgctttcctgatcccctgtcctcccagagatctgcacagcacctggagccgccacttgggctcccagggaggtggggacctgtctccattggaattggctgatgtgaatggagatggcctgcgtgatgtgcttctctcctttgtgatgtcaaggaacgggagtgcagta

SEQ ID NO: 776 - DNA, 906 bp, Homo sapiens
ggctatggtgtgtgctcggtggggctggagtggctggcttacctcctcgtgccttacagcctgggcgcctcagccacctcactcctgggcctgctgggcctgtggctgccacgccctgtgcccctggtggctggagcaggggtgcacctgctgctcaccttcatcctctttttctgggcccctgtgcctcgggtcctgcaacacagctggatcctctatgtggcagccgccctttgggttgtgggcagctccctgaacaagactggactcagcacactcctgggaatcttgtatgaagacaaggagagacaggacttcatcttcaccatctaccactggtggcaggctgtggccatcttcaccgtgtacctgggctcgagcctgcacatgaagctggcgttgctgctggtgacgctggtggcggccacggtctcctacctgcggatggagcagaagctgcggcggggcgtggccccgcggcagccccgcatcccgcggccccagcacaaggtgcgcggttaccgctacttggaggaggacaactcggacgagagcgacgcggagggcgatcttggggacggcgaggaggcggaggcggaggctccgcccgcagggcccaggcctggccccgagcccgctggactcggccgccggccctgcccgtacgaacaggcgcagggggcgatgggccggaggagcactgcctgcctttgccaatcccagccaggagaagggagcgacggagcggctggcagagacagaggagggtgtgaccgcgttgctggtcccccatgggtcctgagggcgcgacagactccggaggcacaccctccaggggcctgtgtaggcatcctcggccctccagcgaccacccccgcgtcggacagggtccacttccgagccacg

SEQ ID NO: 777 - DNA, 255 bp, Homo sapiens
atgcatagcaaatatcctaccctagaaagagataattccaactccaaagaagaacaaagttccagttggccaatcaacaaactattgccaattctgggagggaaagaactgcttattaataagttggtcctacatatgcggatgacttccaaactgactacttacttcaaaagggtgaaggaatttgacattgaaaatggcactacaaaatggcaaacagtcagaagacaaaagcgggagtggatcaagtttgcc

SEQ ID NO: 778 - DNA, 255 bp, Homo sapiens
atgcccaaagtcatgaaggatgttgtgcaccccttggggggagaggagcctagcatggcgagagctgtggttcgcagcgtgggaggttttaccctgggcttgtctttagccacggcctacgggcttctggagctactggtggaaggccacagcccctggggttgcctggtgggcaccctcactttggctgccttccttagcctgggcatgggattctctcgccaggtccgagccactgtcctcctgctgctgcct

SEQ ID NO: 779 - DNA, 357 bp, Homo sapiens
atgattgtgtatgctctgatggtggtgtcttacttcctcgtcactggaggaataatttatgatgttattgttgaacctccaagcattggctctatgactgatgaacacgggcatcagaggccagtagctttcttggcctacagagtaaatgaacaatgtattatggaaggacttgcatccagcttcctgtttacaataggaggtttaggtttcatattcctggaccgatggaatgcaccaaatatcccaaaactcaatagatttcttcttctattcattggattcgtttgtgtcctattgagctttttcatggctagagtattcatgagaatgaaactgccgggctatctgatgggt

SEQ ID NO: 780 - DNA, 255 bp, Homo sapiens
atggcgcagctagagggttactgtttctcggccgccttgagctgtacctttttagtgtcctgcctcctcttctccgccttcagccgggcgctgcgagagccctacatggacgagatcttccacctgcctcaggcgcagcgctactgtgagggccatttctccctttcccagtgggatcccatgattactacattacctggcttgtacctggtgtcagttggagtggtcaaacctgccatttggatctttgcatgg

SEQ ID NO: 781 - DNA, 900 bp, Homo sapiens
aacaactccttagtgactgaatttattcttgctggattaacagatcgtccagagttccggcaacccctctttttcctgtttctagtgatctacattgtcaccatggtaggcaaccttggcttgatcattcttttcggtctaaattctcacctccacacaccaatgtactatttcctcttcaatctctccttcattgatctctgttactcctctgttttcactcccaaaatgctaatgaactttgtatcaaaaaagaatattatctcctatgttgggtgcatgactcagctgtttttctttctcttttttgtcatctctgaatgctacatattgacctcaatggcatatgatcgctatgtggccatctgtaatccattgctgtataaggtcaccatgtcccatcaggtctgttctatgctcacttttgctgcttacataatgggattggctggagccacggcccacaccgggtgcatgcttagactcaccttctgcagtgctaatatcatcaaccattacttgtgtgacatactccccctcctccagctttcctgcaccagcacctatgtcaacgaggtggttgttctcattgttgtgggtattaatatcatggtacccagttgtaccatcctcatttcttatgttttcattgtcactagcattcttcatatcaaatccactcaaggaagatcaaaagccttcagtacttgtagctctcatgtcattgctctgtctctgttttttgggtcagcggcattcatgtatattaaatattcttctggatctatggagcagggaaaagtttcttctgttttctacactaatgtggtgcccatgctcaatcctctcatctacagtttgaggaacaaggatgtcaaagttgcactgaggaaagctctg

SEQ ID NO: 782 - DNA, 660 bp, Homo sapiens
tccatgtctttcctagagatctggtacgtgtctgacatcacccccaagatgctggagggcttcctcctccagcagaaacgcatctctttcgtcgggtgcatgacgcagctctacttcttcagctccctggtgtgcaccgagtgtgtgcttctggcctccatggcctacgaccgctacgtggccatctgccacccgctgcgctaccacgtccttgtgaccccggggctgtgcctccagctggtgggcttctcctttgtgagtggcttcaccatctccatgatcaaggtctgttttatctccagcgtcacgttctgtggctccaacgtcttgaaccacttcttctgtgacatttcccccatcctcaagctggcctgcacggacttctccactgcagagctggtggatttcattctggccttcatcatcctggtgtttccactcctggccaccatgctgtcatatgcgcacatcaccctggctgtcctgcgcatcccctcggccaccggctgctggagagccttcttcacctgcgcctctcacctcaccgtggtcaccgtcttctatacagccttgcttttcatgtatgtccggccccaggccattgattcccggagctccaacaagctcatctctgttttgtacacagttatcacccccatc

SEQ ID NO: 783 - DNA, 600 bp, Homo sapiens
caagccaatcgtagccaactgcgcagtcctccaggaactgaaagcagtgaggatgcctcagcccctcactgtgtccacacaagattgacagaagaaggttcttgtcttcattctggagatgttcatatccagataaatgccatatctaaagaatgtgcggaaaatacaagctccagaaatataaggtcagatgtccatagctgtgcccatggatgggtacacagtcacttacagggtcactcccacagtgaagcaaggctgcctgatgatactgccgcagaatctggagatcacggtagtctcttcaagtggttgcaaaaaagtcttccacatattttgattctgagtgtcaaacttgttatgcagcatataacaggaatttctcttggaattgggctgctaacaacttttatgtatgcaaacaaaagcactgtaaatcaggtttttctaagcaagctgaatttttttatatcctattttggaccatttgagcttctgggaagtactttggattattggaattacagacttcattctgaaattctttttcatgagcttaaaatgccttatcttattggtgccttctttcatcatgccttt

SEQ ID NO: 784 - DNA, 255 bp, Homo sapiens
aaggtcaccccatctctgatcttcgccatcacaattgctacaatcggctctttccaatttggctacaacactggggtcatcaatgctcctgagatgatcataagggaatttatcaacactttgaaggacaaggcaaatacccctccctctgagatgttgtgcttgtccctttggtgcttgtctatggccatattctccattggttgtatgattagctccttttctgttggactgtttgtcaacagctttgacagg

SEQ ID NO: 785 - DNA, 324 bp, Homo sapiens
atggaagttagccactcaactttagaaccagaggcttcttttcctcctcccttcttatcttttctagtttatagcaaatttatattgagccacttattctttctgaatgctagttcccctttagcatttctttttcttcattccctttggactggcccaatgctttggccccttatcaaagcattttctaagaaacagtctgacagctctaatttgcatctggttatgcaagatgtggttaagaacatggactctggaggtaaatacaccttgattccaattcattctctcatttattcattcagcaaatatttagtgaacatc

SEQ ID NO: 786 - DNA, 906 bp, Homo sapiens
atgagtaaccagacgttggtaaccgagttcatcctgcagggcttttcggagcacccagaataccgggtgttcttattcagctgtttcctcttcctctactctggggccctcacaggtaatgtcctcatcaccttggccatcacgttcaaccctgggctccacgctcctatgtactttttcttactcaacttggctactatggacattatctgcacctcttccatcatgcccaaggcgctggccagtctggtgtcggaagagagctccatctcctacgggggctgcatggcccagctctatttcctcacgtgggctgcatcctcagagctgctgctcctcacggtcatggcctatgaccggtacgcagccatctgccacccgctgcattacagcagcatgatgagcaaggtgttctgcagcgggctggccacagccgtgtggctgctctgcgccgtcaacacggccatccacacggggctgatgctgcgcttggatttctgtggccccaatgtcattatccatttcttctgcgaggtccctcccctgctgcttctctcctgcagctccacctacgtcaacggtgtcatgattgtcctggcggatgctttctacggcatagtgaacttcctgatgaccatcgcgtcctatggcttcatcgtctccagcatcctgaaggtgaagactgcctgggggaggcagaaagccttctccacctgctcttcccacctcaccgtggtgtgcatgtattacaccgctgtcttctacgcctacataagcccggtctctggctacagcgcagggaagagcaagttggctggcctgctgtacactgtgctgagtcctaccctcaaccccctcatctatactttgagaaacaaggaggtcaaagcagccctcaggaagctt

SEQ ID NO: 787 - DNA, 255 bp, Homo sapiens
atgggccctggcgagcagccctgccttcggacgctttatggatttattacaactcaagcaagggccagcagaaattctcttttgacagatgtaattgctgcttatcaaatattctgttctcgacccccaaaaggatttgaaaaatactttcctaatggaaaaaaatgggggaaaaatgctaatgaacctaaagaagttatgggacagaaaaaagaatcaaagccagctgctaccacacactcttctgaaggagga

SEQ ID NO: 788 - DNA, 255 bp, Homo sapiens
aatcagacttccatcacagagttcctcctactgggatttcccattggcccaaggattcagatgctcctctttgggctcttctccctgttctacatcttcattctgttggggaacgggacaatcctggggctcatctcactggactccagactccacacccccatgtacttcttcctctcacacctggcggtcgtcgacatcgcctgtgcttgcagcacggtgccccagatgctggtgaacctcctgcatccagcc

SEQ ID NO: 789 - DNA, 255 bp, Homo sapiens
gattcaatggatcagagaaattacaccagagtgaaagaatttaccttcctgggaattactcagtcccgagaactgagccaggtcttatttaccttcctgtttttggtgtacatgacaactctaatgggaaacttcctcatcatggttacagttacctgtgaatctcaccttcatacgcccatgtacttcctgctccgcaacctgtctattcttgacatctgcttttcctccatcacagctcctaaggtcctgata

SEQ ID NO: 790 - DNA, 255 bp, Homo sapiens
atgaaccagactttgaatagcagtgggaccgtggagtcagccctaaactattccagagggagcacagtgcacacggcctacctggtgctgagctccctggccatgttcacctgcctgtgcgggatggcaggcaacagcatggtgatctggctgctgggctttcgaatgcacaggaaccccttctgcatctatatcctcaacctggcggcagccgacctcctcttcctcttcagcatggcttccacgctcagcctg

SEQ ID NO: 791 - DNA, 255 bp, Homo sapiens
atgaagatagcaaacaacacagtagtgacagaatttatcctccttggtctgactcagtctcaagatattcagctcttggtctttgtgctgatcttaattttctaccttatcatcctccctggaaattttctcattattttcaccataaggtcagaccctgggctcacagcccccctctatttatttctgggcaacttggccttcctggatgcatcctactccttcattgtggctcccaggatgttggtggacttc

SEQ ID NO: 792 - DNA, 255 bp, Homo sapiens
cttggccaggtgatttttggtccgctctcagacagaatcgggcgacggccaattctactgcggggcgcaacggctttcgtcattgcgtctctgggagcagcttggtcttcaactgcaccggcctttgtcgctttccgtctacttcaagcagtgggcgcgtcggccatgctggtggcgacgttcgcgacggttcgcgacgtttatgccaaccgtcctgagggtgtcgtcatctacggccttttcagttcgatgctg

SEQ ID NO: 793 - DNA, 729 bp, Homo sapiens
atttacagaactgggtttataggcccaaaaggtcaacgaattttcctcattctcagaggagtccttggttctaccgccatgatgcttatatactatgcttaccagacaatgtccctcgctgatgccacagttatcacgtttagcagtccagtgtttacgtccatatttgcttggatatgtctcaaggaaaaatatagcccttgggatgctcttttcaccgtgttcacaatcactggagtgatccttatcgtgagaccaccatttttgtttggttccgacacttcggggatggaagaaagctattcaggccaccttaagggaacattcgcagcaattggaagtgccgtatttgctgcatcgactctagttatcctaagaaaaatgggaaaatctgtggactactttctgagcatttggtattatgtagtacttggcctcgttgaaagtgtcatcatcctctctgtattaggagagtggagtctgccttactgtgggttggacaggctatttctcatattcattgggctctttggtttggggggtcagatatttatcacaaaagcacttcaaatagaaaaagcagggccagtagcaataatgaagacaatggatgtggtctttgcttttatctttcagattattttctttaataatgtgccaacgtggtggacagtgggtggtgctctctgcgtagtagccagtaatgttggagcggccattcgtaaatgg

SEQ ID NO: 794 - DNA, 606 bp, Homo sapiens
ttaggcttgatttccgactcttttcacatgtttttcgatagcactgccattttggctggactggcagcttctgttatttcaaaatggagagataatgatgctttctcctatgggtatgttagagcggaagttctggctggctttgtcaatggcctatttttgatcttcactgctttttttattttctcagaaggagttgagagagcattagcccctccagatgtccaccatgagagactgcttcttgtttccattcttgggtttgtggtaaacctaataggaatatttgttttcaaacatggaggtcatggacattctcatggctctggccacggacacagtcattccctctttaatggtgctctagatcaggcacatggccatgtcgatcattgccatagccatgaagtgaaacatggtgctgcacatagccatgatcatgctcatggacatggacactttcattctcatggtgtatttttacatatcctagcagatacacttggaagtattggtgtaattgcttctgccatcatgatgcaaaattttggtctgatgatagcagatcctatctgttcaattcttatagccattcttatagttgta

SEQ ID NO: 795 - DNA, 255 bp, Homo sapiens
atggagaatagcacagaagtgacagagtttatcctcttgggattaacagatgaccccaatcttcagatacccctcctcctggcatttttattcatctacctcatcaccctgcttgggaatgggggaatgatggtgatcatccactcagactcccatctccacactccaatgtactttttcctcagtaacctctcccttgtagacttgggttactcatcagctgtagcccccaaaacggtggctgcattgcggtca

SEQ ID NO: 796 - DNA, 906 bp, Homo sapiens
atgaaaaaagaacaagattctaatgtgacagaatttgttcttctgggcctatcatcttcttgggagctgcagctatttctcttcttactatttttgtttttttacattgctattgtcctgggaaacctcttgatagtggtaacagtgcaagcccatgctcacctgctccaatctcctatgtattattttttaggtcatctctctttcattgacctatgcctgagctgtgttactgtgccaaagatgttaggggatttcctacagcagggcaagagcatctctttttcaggatgcctggcccagatctacttcctccactttctaggagccagtgagatgtttttgctgacagtcatggcctatgacaggtatgttgccatctgtaaccctttgcgctaccttacagtcatgaacccccagctatgcctttggttggttcttgcctgctggtgtgggggttttatccactctatcatgcaggtcatactagtcatccagctgcctttctgtgggcccaatgaactggacaacttctactgtgatgtcccacaagtcatcaagctggcctgcatggacacctatgtggtagaggtgctggtgatagccaacagtggtctgctgtctcttgtctgcttcttggtcttactattctcttatgctatcatcctgatcaccctgagaacacacttctgccagggccagaacaaggtcttctctacctgtgcttctcacctgacagtggtcagcctgatcttcgtgccatgcgtattcatctatttgaggcctttctgcagcttctctgtggataagatattctccttgttttacacagtgattacacctatgttgaaccccctcatctacacactcagaaatactgatatgaagacagctatgaagaagctg

SEQ ID NO: 797 - DNA, 255 bp, Homo sapiens
atggaaaataagacagaagtaacacaattcattcttctaggactaaccaatgactcagaactgcaggttcccctctttataacgttccccttcatctatattatcactctggttggaaacctgggaattattgtattgatattctgggattcctgtctccacaatcccatgtacttttttctcagtaacttgtctctagtggacttttgctactcttcagctgtcactcccatcgtcatggctggattccttata

SEQ ID NO: 798 - DNA, 255 bp, Homo sapiens
atgcatcaaggaaaccaaaccaccatcactgaattcattctcctgggatttttcaagcaggatgagcatcaaaacctcctctttgtgcttttcttgggtatgtacctggtcactgtgattgggaacgggctcatcattgtggctatcagcttggatacgtaccttcatacccccatgtatctcttccttgccaatctatcctttgctgatatttcctccatttccaactcagtccccaaaatgctggtgaatatt

SEQ ID NO: 799 - DNA, 255 bp, Homo sapiens
atggctgaaaggaattacaccgtagtgacggagttcttccttactgcatttactgaacatctccagtggagggttcctctcttcctcatatttttgagtttctatcttgccactatgttagggaacacaggcatgatcctcctgatccgtggcgatcgtcggctccacaccccgatgtacttcttcctcagccacctttccttggtggacatctgctactcgtccgccatcatccctcagatgctggctgtgctg

SEQ ID NO: 800 - DNA, 246 bp, Homo sapiens
atgccccaccagacccttagtcagaccaagaagaatccgagtttgatatcctgcttcatatttattggagctgggagtactggagcagcatggtatgtcttgtgtctggcatctttcagtccagatgttagttgggccagaaacaataacccagaaccctggaacaaactgagtcccaatgatcaatacaagtcctactcagtgaatgtagattacagcaaactgaagaaagaaggcccagatttc

SEQ ID NO: 801 - DNA, 888 bp, Homo sapiens
atgaacaatgtaacagaattcatcctgctgggcctcactcacaatccagaactgcagaaattcctgtttgttatgtttttaatcacctacttgatcacactggcaggtaacctgctcatctcagtcatcatcttcatcagcccagccctgggttcccccatgtacctttttctgtcctatttatccattatagatattttctactcttcttccatagcccctaaaatgatctttgacttgatctctgaaaacaacaccatatccttcaatggctgcatgactcagctcttcacagaacatttctttgcggcagctgagaccatcttattaagtgtcatggcctacgactgctatgtggccatctgtaagcccttgcactatgcaaccatcatgacccaatctatgtgtggattcctgatggtggtggctggaattctgggatttgtgcatggaggaatccagactttgttcatagcccagttaccattctgtggccccaatgtcatcgaccactttatgtgtgatttagtacctcttctggagctggcctgcacagacactcacactttagggcctctgattgctgccaacagtgggtcactgtgtttcctcattttttccatactggatgcttcctatgtcatcatcttgtgctccctaaggtctcatagctctgaagggcatctcaaagctctgtctagttgtgcctctcatatcttcactgtcatcttattctttgtcccttgttcatacctgtatctaagacctctaacctccttccccactgacaaagctgtgactgtgttttgcaccctatttacacctatgttgaaccctttaatctacactgtcaaaaataaagcagtgaaaaatgtcattaagaagctc

SEQ ID NO: 802 - DNA, 255 bp, Homo sapiens
ctgcttcgcttgcagcttgccctgtttgtcaactcgctcttgctcattggctccctctacatttggcgcagcacagtgagcaacctctgccactccccagctgcagagtcaacctgttttcagctttggaaggtggtggttctggcatttctggccctggcccattccagtttctttaccatgttctttttagtggccgaagagccctatctcttttccttggcggcctactcctgcctgggtgcttacatcatc

SEQ ID NO: 803 - DNA, 255 bp, Homo sapiens
atgctgactaatatcattctctgcttttcaatggtgtacatgactttctatattgtggaatttttaggaatgtcaggcactcttgccttagccgctgtaggactgaatttagattctttaacttttaaaccgaagatcgaacttgtaattactaagttcttaagaattttttcatctgtatatgaacatttaatatatgctttctttggcattgtgattggatgtggagaactcagccactatgaatttcacact

SEQ ID NO: 804 - DNA, 909 bp, Homo sapiens
agaaataacctaacaagaccctctgaattcatcctccttggactctcctctcgacctgaggatcagaagccgctctttgctgtgttcctccccatctaccttatcacagtgataggaaacctgcttatcatcctggccatccgctcagacactcgtctccagacgcccatgtacttctttctaagcatcctgtcttttgttgacatttgctatgtgacagtcattatccctaagatgctggtgaacttcttatcagagacaaagaccatctcttacagtgagtgtctgacccagatgtactttttcttagcctttggaaacacagacagttacctgctagcagccatggccattgaccgctatgtggccatatgtaatcccttccactacatcaccattatgagtcacagatgctgtgtcctgcttctggttctctccttctgcattccacattttcactccctcctgcacattcttctgactaatcagctcatcttctgtgcctcaaatgtcatccatcactttttctgcgatgatcaaccagtgctaaaattgtcctgttcctcccattttgtcaaagaaatcacagtaatgacagaaggcttggctgtcataatgaccccgttttcatgcatcatcatctcttatttaagaatcctcatcactgttctgaagattccttcagctgctggaaagcgtaaagcattttctacctgtggctctcatctcacagtggtgaccctgttttatggaagcattagctatctctattttcagcccctgtccaactatactgtcaaggatcaaatagcaacaattatctacaccgtactgactcctatgctaaatccatttatctatagtctgaggaacaaagacatgaagcagggtttggcaaagttgatgcac

SEQ ID NO: 805 - DNA, 483 bp, Homo sapiens
tcctggctcacaggcatcatcacggccaccacccatgcctccctcatcttctctctaccttttcgcagccacccgatcatcccgcactttctctgtgacatcctgccagtactgaggctggcaagtgctgggaagcacaggagcgagatctccgtgatgacagccaccatagtcttcattatgatccccttctctctgattgtcacctcttacatccgcatcctgggtgccatcctagcaatggcctccacccagagccgccgcaaggtcttctccacctgctcctcccatctgctcgtggtctctctcttctttggaacagccagcatcacctacatccggccgcaggcaggctcctctgttaccacagaccgcgtcctcagtctcttctacacagtcatcacacccatgctcaaccccatcatctacacccttcggaacaaggacgtgaggagggccctgcgacacttggtgaagaggcag

SEQ ID NO: 806 - DNA, 255 bp, Homo sapiens
atggaaagacaaaatcaaagctgtgtggttgaattcatcctcttgggcttttctaactatcctgagctccaggggcagctctttgtggctttcctggttatttatctggtgaccctgataggaaatgccattattatagtcatcgtctccctagaccagagcctccacgttcccatgtacctgtttctcctgaacttatctgtggtggacctgagtttcagtgcagttattatgcctgaaatgctggtggtcctc

SEQ ID NO: 807 - DNA, 882 bp, Homo sapiens
atgccctccttgcccacgttgatcttcatagccatcttttgcctggagtcattggctgcaatgctgcagaatggattcttggtcacaatgctgggcagggagtgggtaaggtgccggatgctgtccacaagtgacatgattgtggcctgtctcgctgcctcccgtttctgcctgcatggggtagccatggtgaacaacctcctggcctccttagatttttcgcgtgcagttccctatatgaacatcttctgggaccttttcaatgccctcactttgtggtttactgccttgcttgctgctttctactgtgtgaagatctcatctttctcccaccccaccttcgcctggctgaagtggaggaactctcggttagtgcccaagctgatcaagggctccctgatcatctgtggcctggaagtcatctcatcagccactgggaacatcctgtttggtcagaggaaggtctccctgagttcctacagaaacgaaactctagtttatagagtgcaggcttcatttcagctctactttttcctttatgaagggtttgtgtggtcgattctgttcctcctgttcctagtgtccactgtcttgctcatagtctcactgtgctggcagttggggaagaaggctctccttacaacctcaggattccgagagcccagtgtgcaggcacacataaaggctctgctggctctcctctcttttgccatgctcttcatctcatatttcctgtcactggtgttcagtgctgcaggtatttttccacctctggactttaaattctgggtgtgggagtcagtgatttatctgtgtgcagcagttcaccccatcattctgctcttcagcaactgcaggctgagagctgtgctgaagagtcgt

SEQ ID NO: 808 - DNA, 255 bp, Homo sapiens
atgggggatgagctggcaccttgccctgtgggcactacagcttggccggccctgatccagctcatcagcaagacaccctgcatgccccaagcagccagcaacacttccttgggcctgggggacctcagggtgcccagctccatgctgtactggcttttccttccctcaagcctgctggctgcagccacactggctgtcagccccctgctgctggtgaccatcctgcggaaccaacggctgcgacaggagccccac

SEQ ID NO: 809 - DNA, 258 bp, Homo sapiens
atgatcctcttttcagcctgctgtatctgtggacttattgggggcatcctgaattttcagttcctccgggcagtcacaaagaaaacttcctccctatacccactgcaccttgcctccatgtctctcgcgtgcattgggatcgggggctgcactctctcttcctggctcacttgtcgactagccagttatgaacagaggaggatgttctcagaaagggagcattccctgcatcactctcatgaaatggctgagaaagtg

SEQ ID NO: 810 - DNA, 255 bp, Homo sapiens
atggctggcagtcacccctacttcaacctgcctgactccacacacccatcgccgccctccactccacccagcctccactggcaccagcgctgccagccctctgatgccaccaatggcctgctggtggccctgctgggtgggggcctgcctgctggcttcgtgggccccctttctcgtatggcttaccaggcttccaacctgccctcgctggagctggtcatctgtcgatgcctcttccacctccctattgccctg

SEQ ID NO: 811 - DNA, 255 bp, Homo sapiens
ctaagctttccttttagcattatcttctcaactgttctctactgtggtgaggttgcctttggtttatacatgtttgaaatttatcgaaaagctaatgacacattctggatgtcatttaccatcagctttattattgtgggggcaattttggatcaaattatcctgatgtttttcaacaaagacttgaggagaaataaggctgcattacttttttggcacattcttcttttaggacctattgtgaggtgtttgcac

SEQ ID NO: 812 - DNA, 255 bp, Homo sapiens
gtgtctctgttcaactatgtatttttgatttcttgggcttttgctctgccgtacgccaagctgcgccgtctggcttcaagtgtctgcacagtctggacgtgtgtgatcatcgtctgcaaaatgttgtaccagctccaaaccattaagcctgagaacttctctgttaactgttccttgccaaatgaaaatcaaacaaacatcccctttaatgagttgaacaagtctctgctctacagcgctcctatcgatcctaca

SEQ ID NO: 813 - DNA, 255 bp, Homo sapiens
atgaagaatcatacaaggcagatagaatttattcttctgggactgacggataattctcagttacagattgtaattttcttatttctacttctaaattgtgtgttgagcatgatagggaacttcactatcattgccctcattctgctggattcccagctcaagactccaatgtatttcttcctccgtaatttctcttttctggaaatttcattcacaactgcttgcattcccagattcctaatcaccattgttacc

SEQ ID NO: 814 - DNA, 255 bp, Homo sapiens
cgaaggtcaacaatgaaaaacagaaccatgtttggtgagtttattctactgggccttacaaatcaacctgaactccaagtgatgatattcatctttctgttcctcacctacatgctaagtatcctaggaaatctgactattatcaccctcaccttactagacccccacctccagacccccatgtatttcttcctccggaatttctccttcttagaaatttccttcacatccatttttattcccagatttctgacc

SEQ ID NO: 815 - DNA, 903 bp, Homo sapiens
atggaagtcagcaacatgaccacagtcactgtgtttattctcctaggactgtccaacaaccctcaggttcaggcactgctctttgttctgttcctggtgatttacctcttgactctactggggaacctgctgatggtgctggtgatcagtactgattcccacctctgcacccctatgtacttcttcctgagacaactctccttcctggatgctttctattcctcaattattgtgcctaaactgctagagaaccttctttctaagggggagacaatatccttccttgagtgtttcactcagatctccctggtcatattttctggagctactgaggcttgcctcctctcggtcatggcctatgaccggtttcaggccatgtgtcatccactgttgtatgtggtgattataaacaggagggtgtgtgctggcctggtgggggcatcctgggccataggaatggggactggcctaattaacaccctcctcctggctcagcagcacttctgcggccctaatgtcatccacagttttgcctgcgagcttcctccggtgctcttattgacctgttctgacccctgcgctagcatcgtctccattctcactaccatgtcagtcctgggccttggcacccttgtccttttgctgggttcctacagctgtatcatcatgacagccctgaggatcaactctgctacaggtcggagcaagatcttttccacctgctcttcccatttccttgtggtcaccatcttttatacttcaggagttctcaggtatatgattccagcatctggctcagccctagaacaagtgctctccgtgcagtacagtgtgataacccccctgctgaaccccctcatctacagtctgaagagccaggaggtaaaggtggctctgaggagg

SEQ ID NO: 816 - DNA, 255 bp, Homo sapiens
gggaatcacagcaccatcaccgagttcctcctccttgggctgtctgccgaccccaacatccgggctctgctctttgtgctgttcctggggatttacctcctgaccataatggaaaacctgatgctgctgctcatgatcagggctgattcttgtctccataagcccatgtatttcttcctgagtcacctctcttttgttgatctctgcttctcttcagtcattgtgcccaagatgctggagaacctcctgtcacag

SEQ ID NO: 817 - DNA, 396 bp, Homo sapiens
atgaaccacactttccaaaccttcttcactcctgccaacagcggccacccccgcaattatgagatgctcaaggaggagcataaggtggctgtggtgggggcgccccaaaaccctgctcccccgatgtccaccatgatccacttccacagtgagacctccatgcctgaccatgtcgtctggtcgctgttcaacaccctcttcatgaactctggctgcctgtgcttcacagcatttgtgtactctatgaagtctagggagaggaagaaggttggtgacttgaccagggcccaggcctatacctccactgccaagtgcctgaacatctgggccctgatcgtggacattgtcatgaccattctgctcatcatcatcccagtgttgatcttccaagtctat

SEQ ID NO: 818 - DNA, 732 bp, Homo sapiens
gtgtgcacagccttcactgcagagcacgccacgcatgggcacgtcaagatgcaccatgcctacaccaacgtggtgggcctgggggactccagcacgtggaggctgccttgcctcaaccgctatgtctacatgttccttgctcctttcctcctccccatcgccactccactggtggctgtcgagcggctgaggaaggtggagctcgggacagccctgcggacgctggccctgatttctctgggcctttattctcactactggctgctcctgaacgtgtcaggcttcaagaaccccagctcagccctgggctgcatgttcctcaccagatccctgttggcccacccctacctccacgtcaacatcttccagcacatcggactgcccatgttctcccgggacaacaagccccgtcggattcacatgatgagcctgggggtgcttaacctggcccggctgcccgtgctggactgggcgttcggccactcgatcatcagctgccatgtggaacaccatctattccccaggctctctgataacatgtgcctgaagcccctgctcataggccctctcctgcccatcttccaccaggtgaagcccgtggtgtcccagttcctacgtgagaagcagctaccgtacaacgaggactcatacctggctcgcttccagctgtttctccgtcgctatgaggaattcatggtgcaggccccacccatcactgagcttgtggggctg

SEQ ID NO: 819 - DNA, 903 bp, Homo sapiens
aatggcagcatagtgacggaatttatcctcgtgggctttcagcagagctccacttccacacgagcattgctctttgccctcttcttggccctctacagcctcaccatggccatgaatggcctcatcatctttatcacctcctggacagaccccaagctcaacagccccatgtacttcttcctcggccatctgtctctcctggatgtctgcttcatcaccactaccatcccacagatgttgatccacctcgtggtcagggaccacattgtctcctttgtatgttgcatgacccagatgtactttgtcttctgtgttggtgtggccgagtgcatcctcttggctttcatggcctatgaccgttatgttgctatctgctacccacttaactatgtcccgatcataagccagaaggtctgtgtcaggcttgtgggaactgcctggttctttgggctgatcaatggcatctttctcgagtatatttcattccgagagcccttccgcagagacaaccacatagaaagcttcttctgtgaggcccccatagtgattggcctctcttgtggggaccctcagtttagtctgtgggcaatctttgccgatgccatcgtggtaattctcagccccatggtgctcactgtcacttcctatgtgcacatcctggccaccatcctcagcaaagcctcctcctcaggtcgggggaagactttctctacttgtgcctctcacctgactgtggtcatctttctctacacttcagctatgttctcttacatgaacccccacagcacacatgggcctgacaaagacaaacctttctccctcctgtacaccatcattacccccatgtgcaaccccatcatttatagtttccgcaacaaggaaattaaggaggccatggtgagg

SEQ ID NO: 820 - DNA, 891 bp, Homo sapiens
aatcacagcgttgtaactgagttcattattctgggcctcaccaaaaagcctgaactccagggaattatcttcctcttttttctcattgtctatcttgtggcttttctcggcaacatgctcatcatcattgccaaaatctataacaacaccttgcatacgcccatgtatgttttccttctgacactggctgttgtggacatcatctgcacaacaagcatcataccgaagatgctggggaccatgctaacatcagaaaataccatttcatatgcaggctgcatgtcccagctcttcttgttcacatggtctctgggagctgagatggttctcttcaccaccatggcctatgaccgctatgtggccatttgtttccctcttcattacagtactattatgaaccaccatatgtgtgtagccttgctcagcatggtcatggctattgcagtcaccaattcctgggtgcacacagctcttatcatgaggttgactttctgtgggccaaacaccattgaccacttcttctgtgagatacccccattgctggctttgtcctgtagccctgtaagaatcaatgaggtgatggtgtatgttgctgatattaccctggccataggggactttattcttacctgcatctcctatggttttatcattgttgctattctccgtatccgcacagtagaaggcaagaggaaggccttctcaacatgctcatctcatctcacagtggtgaccctttactattctcctgtaatctacacctatatccgccctgcttccagctatacatttgaaagagacaaggtggtagctgcactctatactcttgtgactcccacattaaacccgatggtgtacagcttccagaatagggagatgcaggcaggaatt

SEQ ID NO: 821 - DNA, 255 bp, Homo sapiens
atgggattgggcaatgagagttccctaatggatttcatccttctaggcttctcagaccaccctcgtctggaggctgttctctttgtatttgtccttttcttctacctcctgacccttgtgggaaacttcaccataatcatcatctcatatctggatccccctcttcataccccaatgtacttttttctcagcaacctctctttactggacatctgcttcactactagccttgctcctcagaccttagttaacttg

SEQ ID NO: 822 - DNA, 219 bp, Homo sapiens
gtctcagcattagagaggcagatctttgacttccttggtttccagtgggcgcctattcttggaaattttctacacataatagttgtcatattgggtttgtttgggaccattcagtacagacctcgatacataatggtgtatacagtgtggactgccctctgggtcacctggaatgtgttcattatctgcttttatttggaagtaggtggactctcaaag

SEQ ID NO: 823 - DNA, 699 bp, Homo sapiens
atggagcccaatgctacgttcaccacgcagctcacggccacacctgagcgactgctccgactcatctctgctggggtctgtggcctcatcctgctggtggggctgtcagctaatgggctcatgctgctggtggtgggccggggcccgggctccccccacccgctccactccctgacccacagcctcatgatgaacatcacgccatctgacctgctcttcctggcctgcgtggtgcctgtgctgctgctgagcttcctgcagcacaactggtggctgggccctgccatctgcaccattagccaggccaccaacacagccaccacgttctgcatcttctatagcatggtggccacagctctcctgcgccatgtggctgtggcccggcctgacctggccttcccagccggctggggcaccctcttgctgctctgtggggccatgtgggccctgggccttacagaatccctgcccaactggctgttccagagggtggcagtggaggaggagacagcgggggctcccaagacccaggcctgcctcttgctcctgagccctgctgggacctcctgctacatcagcctgctgggagccctggccttcctgccatgcacgctggggctgggctgctctttcagccacgtgggctggctcctgtggacccagccccaaggtcccatgggagagagcatccaggagcat

SEQ ID NO: 824 - DNA, 624 bp, Homo sapiens
atggaaatgaccaagcttttcagctatattgtcattaaaaatgtttattaccctcaagtcagctttggaatctcagcaaacaccttcctccttcttttccacatcttcacttttgcttatactcacaggcttaagcccattgacatgaccattagtcacttgcccctaatccacatactgctactcttcactcaggcgatactggtgtcctccgacttatttgaatcatggaatattcagaacaatgatctaaagtgtaagatcatcacatttttaaacagggtgatgaggggagtctccatctgcaccacttgcctcctaagcgtgctccaggccatcaccatcagccccagcacctccttcttggaaaagtttaaacatatttctgcaaatcacaccttaggcttcatcctcttctcatgggtcctcaacatgttcattactaataaccttttgcttttcattgtgcctaccccgaataggattggggccagtcttttgtttgtcactgagcactgttatgttttgcccatgagctacacccacaggagcctgtttttcatactaatggttttgagggatgtcatcttcataggactcatggtcctctcaagtggctatggg

SEQ ID NO: 825 - DNA, 255 bp, Homo sapiens
tggcccccgctccttttcctcctcctcctacctggagggagcggtggcagctgccctgctgtgtgtgactgcacctcccagccccaggctgtgctctgtggccacaggcaactggaggctgtacctggaggactcccactggacactgagctcctggacctgagtgggaaccgcctgtgggggctccagcagggaatgctctcccgcctgagcctgctccaggaattggacctcagctacaaccagctctcaacc

SEQ ID NO: 826 - DNA, 348 bp, Homo sapiens
caaaagactgaggaggaactggatgagggcgaccacaaggagccagatgagaccctgtcggagaggctgtggggcctgaaggagatgttccggagaggggccagtccgagggcagagccactttccatctctcccctcttcgtggctcaaaaaatgtactggttttccagggcagccttgtggattggaacctctttcttcatgattctggttcttgttgtcatctttgagacagagaagttgcaaatggggcaaccgcagcagcagcagcagcggcagatacgtctccggcgccacacggctgtccagaagaatgccaggggccctccttcacttcctggaaagatc

SEQ ID NO: 827 - DNA, 486 bp, Homo sapiens
atatttatcaattctttaattgcagccttgactattggtgggcaacaactcttctcctcttctacattcagctgtccttgtcaggttggaaaaaatttctattatggttctgcttttcttgtcattcctgccttgatccttctcgttgctggctttgctctgagaagccaaatgtggacaattaccggtgaatactgctgcagctgtgcccctccatacaggagaatcagccccctagagtgcaagctggcttgccttaggttcttcagcatcactgggagggcagttattgctcctttaacttggctggcggtgaccctgctgacaggcacgtattatgaatgtgcagcaagtgaatttgcatctgtggaccattacccaatgtttgataatgtcagtgccagcaaacgagaagagatcctggctgggtttccatgttgcagatcagctccttctgacgtgatcctagtaagagatgaaatagct

SEQ ID NO: 828 - DNA, 894 bp, Homo sapiens
atggctgagaaccaagttaatgacccaaaagaccaagagctcaaccaaaagcaaggtttttgcacaaccaaaagcaaaaacacattctcctgggggtatgaaaggagaaatcacagagacactccgagccccttctgcttctgccatgccagtgccactaccgccacgggcctcaccatctcctctttcttctcccacctctttgacaagaagcagatgcacattctgatggttggattggatgccgctggcaagacgaccattccgtatgaactgaagttaggggagatagtcaccaccattcctaccgttggctgcaatgtggaagcggtagactataaaaacattcgtttcacagtatgggatgctggtggtcaagatagaattaggcctctccggaagtattacttcccaaatacccaatatcttatatttgtggtagatagcaataatcgtgaaagaattaaggaggtagcagagacgggggtagaagtcctggctgccaggaccactgatttgctgattccaagagtaacccagcaccgcagtgaggagaccatgtgtgtcttgaaaggagagttgtcaacttgtcttccaggaatgattgtgatgcaatgcaaaattaacctggtctcgtctgctgctgcagggagccctgcagtactggaaaacagccagcagctgtcacggatgcgccagcagcttctgcttctccgtgtaatgcacgtcccccatgcccctagctttggggacttgccgtttgccccagcaccggctggcacagggatgtgtctgtggaggggtctttgctattgctgccctcgcggcagggttttggatgatgggattctgcacactcgcatctttcacttcggggcatgtcatcctgctaaa

SEQ ID NO: 829 - DNA, 489 bp, Homo sapiens
ggccaatattggaagccatcagaacctcccaatcctaccaatgaaagatacacacttcaccagaattgggctcgattttcctatttctacaaggagcagcctttagacttgattaagaattattatggagaaaaaattggtatctattttgtctttcttggattttacacagaaatgctattctttgcagctgtagttggcttagcttgttttatttatggcttattatcaatggaacataacacaagcagcactgaaatctgtgaccctgagattggtggtcagatgatcatgtgcccactctgtgatcaagtgtgtgattattggagactaaatatcaccttatttttggagttttggaaacaacgacaagccagactggaatatgaatgggacctggtggactttgaagaggaacagcagcagcttcagctgagaccagaatttgaagctatgtgtaaacacaggaaattgaatgcagtgactaag

SEQ ID NO: 830 - DNA, 255 bp, Homo sapiens
cattccttgcccagttacacagcactactggacctcagtcacaacaacctgagccgcctgcgggccgagtggacccccacgcgcctgacccaactgcactccctgctgctgagccacaaccacctgaacttcatctcctctgaggccttttccccggtacccaacctgcgctacctggacctctcctccaaccagctgcgtacactggatgagttcctgttcagtgacctgcaagtactggaggtgctgctgctc

SEQ ID NO: 831 - DNA, 639 bp, Homo sapiens
gagccgagactgacccgctggctgcggagaggcagtgggatcttggcgcacctggtagctttgggcttcaccatctttctgacagcgctgtcccggccaggaaccaacatgaggcttactggctctctcctatgttcacagttctgcctctgcatggctgaagccatcctactcttctcacctgaacactccctgttcttcttctgctcccgaaaagcacggatccggctccactgggcagggcagaccctagccatcctctgtgcagctctgggcctgggcttcatcatctccagcaggacccgcagtgagctgcctcatctggtgtcctggcacagctgggtgggagccctgacactgctggccactgctgtccaggcactgtgtgggctctgcctcctttgtccccgggcagccagggtctcaagggtggctcgcctcaagctctaccatctgacatgtggactggtggtctacctgatggctacagtaacggtgcttctgggcatgtactcagtatggttccaggcccagatcaaaggtgcggcctggtacctgtgcctggcactgcccgtctatccagccctggtgatcatgcaccagatttccagatcctacttgccgaggaagaaaatggaa

SEQ ID NO: 832 - DNA, 441 bp, Homo sapiens
atggagattttgtaccatgtcctgttcttagtgcttgaatgtcctaacctgaagctgaagaagccgccctggctgcacatgctgtcggccatgactgtatgctctggtggtggtgtcttcctcattaccggaggaatcatttatgatgttattgttgaacctccaagtgttggctctatgactgatgaacatgggcatcagaggccagtagctttctttgcctatagagtaaatggacaatatattatggaaggacttgcatccagcttcctgtttacaatgggaggtttaggtttcataatcctggaccaattgaatgcaccaaatatcccaaaactcaatagatttcttcttctattcattggatttgtctgtgttctattgagtattttcatggctagagtattcatgagaatgaaactgccgagctatctgatgggt

SEQ ID NO: 833 - DNA, 255 bp, Homo sapiens
atggaacaggataatacaacattgctgacagagtttgttctcacaggacttacatatcagccagagtggaaaatgcccctgttcttggtgttcttggtgatctatctcatcactattgtgtggaaccttggtctgattgctcttatctggaatgacccacaacttcacatccccatgtacttttttcttgggagtttagcctttgttgatgcttggatatcttccacagtaactcccaaaatgttggttaatttc

SEQ ID NO: 834 - DNA, 255 bp, Homo sapiens
ccagccccggggctcggggctggggagatcatggcccgcctcttcagcccccggccgccccccagcgaagacctcttctacgagacctactacagcctgagccagcagtacccgctgctgctgctgctgctggggatcgtgctctgtgcgctcgcggcgctgctcgcagtggcctgggccagcggcagggagctgacctcagacccgagcttcctgaccactgtgctgtgcgcgctgggcggcttctcgctgctg

SEQ ID NO: 835 - DNA, 513 bp, Homo sapiens
aatttgagaaatgaagaacaggttgcaataatccaagctggaactgtgcttgccctgtgtgaaaaggtagaagccagcggcatttctgtgctcacaccttgtcccagcttcccagcaccatacaagaaactgcagaagggctacctggaagaggagctcgactaccggaagcaagcccttgaccaggcttacctgaaaatccaagacctggaggccacactgtacacagcgctgcagcaggagccggggcggagggccggtgaggcgctgagcgagggccagcgggaggacctgcaggctgctgtggaaaaggtgcgcaggcagatcctcaggcagagccgcgagttcgacagccagatcctgcgggagcgcatggagctgctgcagcaggcccagcagagaatccgagaactggaggacaaactggagtttcagaagcggcacctgaaagaactggaggaaaagtttttgttcctttttttgtttttctcactagcattcattctgtggcct

SEQ ID NO: 836 - DNA, 255 bp, Homo sapiens
atgcctactgtaaaccacagtggcactagccacacagtcttccacttgctgggcatccctggcctacaggaccagcacatgtggatttctatcccattcttcatttcctatgtcaccgcccttcttgggaacagcctgctcatcttcattatcctcacaaagcgcagcctccatgaacccatgtacctcttcctctgcatgctggctggagcagacattgtcctctccacgtgcaccattcctcaggccttagct

SEQ ID NO: 837 - DNA, 543 bp, Homo sapiens
ccttctcacagttccagctgcaataactttcagagcaaggagggaagaggtcaaagaactgccaccatgcccgttctttctcatcaaggaagcaaatgcctccaagtccctgcagcaggtttccctcgcaacctgagagctgacccgtgggccttgctagctgcaggggaggagctgagactggcatcgtacctggcgaggatggccatggtgcccggggccacgcttcgccggctcctgagtgtggtactgcccacagcctcacagcctcagctgctggccctgctggattcggccaccgagagacatgtggaccacgcagctgagagcgatggcggagcggagcaggccgacgtgggcaggcggaggaaacaccagagctggtggcaagccttagatggcaaactgcgaggagatctgataagcagaggattagaaaagatgctgtgggcccgcaagagaaagcagaggcttgcgctctttaccttcaccccaatgcctttttccttggctgtggctatcacacacctacagacagaggga

SEQ ID NO: 838 - DNA, 255 bp, Homo sapiens
aatgagaccgagaccaagatcttcctgcagttttatgaccaaacaggtgaagttgtgttgaacaagttcatggaggccacttggaactatgtcaccaatatcaccaggaaaaatcaggaggagatgatcaaggacatggagaggtcccagttcatgatttactttggcacccaggcccacctgtttaaagtcacccagttcaaggacccggatgtgaatggcatgctgagtaagctgcagaacatagacaaggcg

SEQ ID NO: 839 - DNA, 255 bp, Homo sapiens
ggctggaggaacttccatcctcaatgtctccagcgctgcaacacacctggaggctttctgcttcactactgcctcttggccgtcacgcaaggtattgtagttaatggcctagtaaatattagcatttccactgttgagaagcgttatgaaatgaagagttccctgactggcctgatttcatcaagctacgatatttcattctgtttgttgtctttatttgtatcattctttggtgaaagaggacataagccgaga

SEQ ID NO: 840 - DNA, 255 bp, Homo sapiens
atgcccacactcaatacttctgcctctccacccacattcttctgggccaatgcctccggaggcagtgtgctgagtgctgatgatgctccgatgcctgtcaaattcctagccctgaggctcatggttgccctggcctatgggcttgtgggggccattggcttgctgggaaatttggcggtgctgtgggtactgagtaactgtgcccggagagcccctggcccaccttcagacaccttcgtcttcaacctggctctg

SEQ ID NO: 841 - DNA, 588 bp, Homo sapiens
cacacgcaggacttgaaagatgttactaataatgtccactacgagaactatggaatcagaaaactggcagctgtgacttatcatggagttgataacaagaagaataaagggcagtttgctaagagccctctggcacaaatggaagaagaaagaagggagcaagtagctaaaattaagaagatggagatggagatggagcaggtgtttgaaatgaaggtcaaagaaaaagttcaaaaactgaaggactctgaagctgagcttggacgccgctgccgccggggtccaatgccggtcatgcccatcccgcgggggttgtgctccttccatggtccacacaccacctgcctgcatgcggtctgtgggcccgtgggcgcctcccacctggcccgcaccaagtacaacagcttcgagtacttgggcgttagcgtcctcctgtgcttccagcacaagctgtgggtgctgctgctgctgctgggccgctggcgcgtggaattccgcctggtgaacgagctgctcatctacagcatccacgtcaccatgctgctggatgggggcctgggctggtgcctcatggtcttcgtggacatg

SEQ ID NO: 842 - DNA, 252 bp, Homo sapiens
gtaccagtgaaggacaagaaacttctggaggtcaaactaggggagctgccaagctggatcttgatgtgggacttcagccctagtggccttgatggagcgtttcaaagaggttactactggtactacaacaagtacatcaacgtgaagaaggggagcatctcggggtttaccatggtgctggcagggtacatgctcttcatctactgcctttcctacaaggagctcaagcacgagcggctatgcaagtaccac

SEQ ID NO: 843 - DNA, 255 bp, Homo sapiens
atgctggcagctgcctttgcagactctaactccagcagcatgaatgtgtcctttgctcacctccactttgccggagggtacctgccctctgattcccaggactggagaaccatcatcccggctctcttggtggctgtctgcctggtgggcttcgtgggaaacctgtgtgtgattggcatcctccttcacaatgcttggaaaggaaagccatccatgatccactccctgattctgaatctcagcctggctgatctc

SEQ ID NO: 844 - DNA, 510 bp, Homo sapiens
atggaggctccgggaccccgcgccttgcggactgcgctctgtggcggctgttgctgcctcctcctatgtgcccagctggctgtggctggtaaaggagctcgaggctttgggaggggagccctgatccgcctgaatatctggccggcggtccaaggggcctgcaaacagctggaggtctgtgagcactgcgtggagggagacagagcgcgcaatctctccagctgcatgtgggagcagtgccggccagaggagccaggacactgtgtggcccaatctgaggtggtcaaggaaggttgctccatctacaaccgctcagaggcatgtccaggtaagggggttcttgcacctaagccaagttgcatggggagccccccagtccctgaggcccacagccctggatttgacggggccagctttatcggaggtgtcgtgctggtgttgagcctacaggcggtggctttctttgtgctgcacttcctcaaggccaaggacagcacctaccagacgctg

SEQ ID NO: 845 - DNA, 903 bp, Homo sapiens
atggcctcccggtatgtggcagtgggaatgatcttatcacagaccgtggtgggagtcctggggagcttctctgttcttctccattatctctccttttactgcactgggtgcaggttaaggtccacagatttgattgttaagcacctgattgtagccaacttcttagctctccgctgtaaaggagtcccccagacaatggcagcttttggggttagatattttctcaatgctcttgggtgcaaacttgttttctatctccatagagtgggcaggggagtgtccattggcaccacctgcctcttgagtgtcttccaggtgatcacggtcagctccaggaaatccaggtgggcaaaacttaaagagaaagcccccaagcatgttggcttttctgttctcctgtgctggatcgtgtgcatgttggtaaacatcatctttcccatgtatgtgactggcaaatggaactacacaaacatcacagtgaacgaggatttgggatactgttctgggggaggcaacaacaaaatcgcacagacactgcgtgcaatgttgttatcattccctgatgtgttgtgtctggggctcatgctctgggtcagcagctccatggtttgcatactgcacaggcacaagcagcgggtccagcacattgataggagcgatctctcccccagagcctccccagagaacagagctacgcagagcatcctcatcctggtgagcacctttgtgtcttcttacactctctcctgccttttccaagtttgtatggctcttttggataatcccaatagtttactggtgaacacttcagccttaatgagtgtatgtttcccaactctcagcccctttgttctcatgagctgtgaccccagtgtatacaggttttgttttgcctggaaaaga

SEQ ID NO: 846 - DNA, 255 bp, Homo sapiens
atgactcacactctttaccctaccccttttgctttgtatccaataaatatcagcgcagcctggcatttggggccactaccagtctcctgctttgtatccaataaatatcagcgcagcctggcattcggggccactaccggtctccgcgtcttggtggtagtggtcccccagacacagctgtcttttctttcatctctttgtcttgtgtctttatttctacactctcttgtctctgcacacggagagaaacccacc

SEQ ID NO: 847 - DNA, 564 bp, Homo sapiens
gttaaacctccaactgtgattggtcaattccacacccttttctttggatcgatccgaatattcttcctcggggtgctaggctttgcagtttatgggaatgaggccttgcacttcatttgcgatccagacaaaagagaagtaaacctcttctgttacaatcagttcaggccaatcactccacaagcattacaactagttattgtcctggttcctggagctcttttccacctttatgctgcatgtaaaagcatcaatcaagaatgcattcttcaaaagcctatctacactataatttatatactctctgttttattaagaattagtctagcggcaatagcattctggcttcagatttacctctttggtttccaagtaaaatctctttacctgtgtgatgctagatctcttggggaaaacatgattataagatgcatggttccagaacactttgaaaaaaccatttttctcattgcaataaatacatttacaacaattacaattttattatttgttgctgagatttttgagatcatatttagaagattatactttccattcagacaa

SEQ ID NO: 848 - DNA, 255 bp, Homo sapiens
ttggagattgtgctcagtgttcttctgcttgtgttgtttatcatcagtattgttctaattgtgcttttagccaaagagtcactgaaatcaacagccccagatcctgggacaactggtaccccagatcctgggacaactggtaccccagatcctggaacaactggtaccacacatgctaggacaacgggtcccccagatcctggaacaactggtaccactcctgtttctgctgaatgtccagtggtaaatgaattg

SEQ ID NO: 849 - DNA, 255 bp, Homo sapiens
cacagaatggcagaaactctacaactcaattccaccttcctacacccaaacttcttcatactgactggctttccagggctaggaagtgcccagacttggctgacactggtctttgggcccatttatctgctggccctgctgggcaatggagcactgccggcagtggtgtggatagactccacactgcaccagcccatgtttctactgttggccatcctggcagccacagacctgggcttagccacatctatagcc

SEQ ID NO: 850 - DNA, 906 bp, Homo sapiens
gtctctgaattcctcctcatctgcttccccaacttccagagttggcagcactggctctccctgcccctcagccttctcttcctcctggccatgggagctaacaccaccctcctgatcaccatccagctggaggcctctctgcaccagcccctgtactacctgctcagcctcctctccctgctggacatcgtgctctgcctcaccgtcatccccaaggtcctggccatcttctggtatgatcttaggtcgatcagcttccctgcctgcttcctccagatgttcatcatgaacagtttcctccccatggagtcctgcacgtttatggtcatggcctatgaccgttatgtggccatctgccacccactgcggtacccatccatcatcactaatcaatttgtggccaaagctagtgtcttcattgtggtgcggaatgcgcttcttactgcacccattcctatcctcacttccctgctccattactgtggggaaaatgtcattgagaactgcatctgtgccaacttgtctgtgtccaggctctcctgtgataatttcacccttaacagaatctaccaatttgtggctggttggaccttgctgggctcagatttattcctcatcttcctctcttacaccttcattctaagagctgtgcttagattcaaagcagagggggcggcagtgaaggccctgagcacatgtggctcccacttcatcctcattcttttcttcagcaccatactgctggttgtggtgttgacaaacgtggccagaaagaaggtccccatggacatcctgatcctgctgaacgtccttcatcaccttattcctcctgcattgaaccctattgtgtatggggttcggaccaaagagataaaacagggaattcagaagttactgcagagaggg

SEQ ID NO: 851 - DNA, 888 bp, Homo sapiens
tttctcctggtagggattccaggtttagaggaaagccagcactggattgcactgcccctgggcatcctttacctccttgctttagtgggcaatgttaccattctcttcatcatctggatggacccatccttgcaccaatctatgtacctcttcctgtccatgctagctgccatcgacctggttctggcctcctccactgcacccaaagcccttgcagtgctcctggttcatgcccacgagattgggtacatcgtctgcctgatccagatgttcttcatccatgcattctcctccatggagtcaggggtacttgtggccatggctctggattgctatgtagccatttgtcaccccttgcaccattccacaatcctgcatccaggggtcatagggtgcatcggaatggtggtgctggtgaggggattactactccttatccccttccccattttgttgggaaaacttatcttctgccaagccaccatcataggccatgcctattgtgaacatatggctgttgtgaaacttgcctgctcagaaaccacagtcaatcgagcttatgggctgactatggccttgcttgtgattgggctggatgttctggccattggtgtttcctatgcccacatcctccaggcagtgctgaaggtaccagggagtgaggcccgacttaaggcgtttagcacatgtggctctcatatttgtgtcatcctggtcttctatgtccctggaattttctccttcctcactcaccgctttggtcatcatgtaccccatcatgtccatgttcttctggccacatggtatctcctcatgccacctgcgctcaatcctcttgtctatggagtgaagactcagcagatccgccagcgagtgctcagagtgttt

SEQ ID NO: 852 - DNA, 255 bp, Homo sapiens
atgacattacccagcaacaactccacttccccagtctttgaattcttcctcatttgtttccccagtttccagagctggcagcactggctgtctctgcccctcagcctcctcttcctcctggccatgggggccaatgccacccttctgatcaccatctatctggaagcctctctgcaccagcccctgtactacctgctcagcctcctctccctgctggacatcgtactctgcctcaccgtcatccccaaggtcctg

SEQ ID NO: 853 - DNA, 255 bp, Homo sapiens
atgacaacacaccgaaatgacaccctctccactgaagcttcagacttcctcttgaattgttttgtcagatcccccagctggcagcactggctgtccctgcccctcagcctccttttcctcttggccgtaggggccaacaccaccctcctgatgaccatctggctggaggcctctctgcaccagcccctgtactacctgctcagcctcctctccctgctggacatcgtgctctgcctcactgtcatccccaaggtc

SEQ ID NO: 854 - DNA, 789 bp, Homo sapiens
ctcggcctcggtgggctgctggggaatggggcagtcctctggctgctcagctccaatgtctacagaaaccccttcgccatctacctcctggacgtggcctgcgcggatctcatcttccttggctgccacatggtggccatcgtccccgacttgctgcaaggccggctggacttcccgggcttcgtgcagaccagcctggcaacgctgcgcttcttctgctacatcgtgggcctgagtctcctggcggccgtcagcgtggagcagtgcctggccgccctcttcccagcctggtactcgtgccgccgcccacgccacctgaccacctgtgtgtgcgccctcacctgggccctctgcctgctgctgcacctgctgctcagcagcgcctgcacccagttcttcggggagcccagccgccacttgtgccggacgctgtggctggtggcagcggtgctgctggctctgctgtgttgcaccatgtgtggggccagccttatgctgctgctgcgggtggagcgaggcccccagcggcccccaccccggggcttccctgggctcatcctcctcaccgtcctcctcttcctcttctgcggcctgcccttcggcatctactggctgtcccggaacctgctctggtacatcccccactacttctaccacttcagcttcctcatggccgccgtgcactgcgcggccaagcccgtcgtctacttctgcctgggcagtgcccagggccgcaggctgcccctccggctggtcctccagcgagcgctgggagacgaggctgagctg

SEQ ID NO: 855 - DNA, 858 bp, Homo sapiens
atgtttgggctgttcggcctctggagaaccttcgacagtgtggtcttctacctgacgctgatcgtgggcctcgggggaccggtaggtaacgggctggtgctctggaacctcggcttccgcatcaagaagggccccttctccatctacctgctgcacctggccgccgccgacttcctgttcctctcctgccgtgtgggcttctccgtggctcaggctgccctgggcgcccaggacacactctacttcgtgctcaccttcctgtggttcgcggtggggctctggctgctggcggccttcagcgtggagcgctgcctctccgacctcttccccgcctgctaccagggctgccggcccagacacgcctcggccgtcctctgcgccctggtgtggaccccgaccctgccggccgtgccgctgcccgccaacgcctgcggcctgctgcgcaacagcgcgtgccccctggtctgcccgcgctaccacgtggccagcgtcacctggttcctggtgctggcccgcgtcgcctggacggctggcgtggtcctctttgtctgggtgacctgctgctccactcgcccgcggcccaggctctacggcatcgtcctgggcgcgctgctcctgctcttcttctgtggcctgccctcggtcttctactggagcctgcagcccctgctgaacttcctgctgcccgtgttttccccgctggccacgctgctggcctgcgtcaacagcagctccaagcccctcatctactcggggttgggccgacagcccgggaagcgggagccgctgaggtcggtactgcggagggccctgggggagggcgccgagctgggtgccaggggacagtccctgcccatg

SEQ ID NO: 856 - DNA, 897 bp, Homo sapiens
ttcctactgctgggtatcccagggctagaagatgtgcacatttggattggagtcccttttttctttgtgtatcttgttgcactcctgggaaacactgctctcttgtttgtgatccagactgagcagagtctccatgagcctatgtactacttcctggccatgttggattccattgacctgggcttgtctacagccaccatccccaaaatgttgggcatcttctggttcaataccaaagaaatatcttttggaggctgcctttctcacatgttcttcatccatttcttcactgctatggagagcattgtgttggtggccatggcctttgaccgctacattgccatttgcaaacctcttcggtacaccatgatcctcaccagcaaaatcatcagcctcattgcaggcattgctgtcctgaggagcctgtacatggttgttccactggtgtttctccttctgaggctgcccttctgtgggcatcgtatcatccctcatacttattgtgagcacatgggcattgcccgtctggcctgtgccagcatcaaagtcaacattaggtttggccttggcaacatatctctcttgttactggatgttatccttattattctctcctatgtcaggatcctgtatgctgtcttctgcctgccctcctgggaagctcgactcaaagctctcaacacctgtggttctcatattggtgttatcttagccttttttacaccagcatttttttcattcttgacacatcgttttggccataatatcccacagtatatacatattatattagccaacctgtatgtggttgtcccaccagccctcaatcctgtaatctatggagtcaggacaaagcagattcgagagagagtgctgaggatttttctcaagaccaat

SEQ ID NO: 857 - DNA, 255 bp, Homo sapiens
tccaacagctctaagttccaggtctctgagtttatcctgatgggattccctggcattcacagttggcagcactggctctccctgcccctggctctgctctacctcttagctctcagtgccaacatccttatcctgatcatcatcaacaaagaggcagcactgcaccagcctatgtactatttcctgggcatcttggctatggcagacataggcctggctaccaccatcatgcctaagattttggccatcttatgg

SEQ ID NO: 858 - DNA, 255 bp, Homo sapiens
atggacaccaggtctctgtggaccctggcccaagcccggaagccctgggcaggctcgactctcctgctggctgtggagaccctggcatgcagcctgtgcccacaggaccaccccttcgccttcagcttacccaatgtgctgctgcagagccagctgtttggacccacgtttcctgctgactacagcatctccttccctactcggcccccactgcaggctcagattcccaggcactcactggccccattggtccgt

SEQ ID NO: 859 - DNA, 870 bp, Homo sapiens
accactggagactggtcttctgagggctgctccacggaggtcagacctgaggggaccgtgtgctgctgtgaccacctgacctttttcgccctgctcctgagacccaccttggaccagtccacggtgcatatcctcacacgcatctcccaggcgggctgtggggtctccatgatcttcctggccttcaccattattctttatgcctttctgaggctttcccgggagaggttcaagtcagaagatgccccaaagatccacgtggccctgggtggcagcctgttcctcctgaatctggccttcttggtcaatgtggggagtggctcaaaggggtctgatgctgcctgctgggcccggggggctgtcttccactacttcctgctctgtgccttcacctggatgggccttgaagccttccacctctacctgctcgctgtcagggtcttcaacacctacttcgggcactacttcctgaagctgagcctggtgggctggggcctgcccgccctgatggtcatcggcactgggagtgccaacagctacggcctctacaccatccgtgatagggagaaccgcacctctctggagctatgctggttccgtgaagggacaaccatgtacgccctctatatcaccgtccacggctacttcctcatcaccttcctctttggcatggtggtcctggccctggtggtctggaagatcttcaccctgtcccgtgctacagcggtcaaggagcgggggaagaaccggaagaaggtgctcaccctgctgggcctctcgagcctggtgggtgtgacatgggggttggccatcttcaccccgttgggcctctccaccgtctacatctttgcacttttcaactccttgcaa

SEQ ID NO: 860 - DNA, 789 bp, Homo sapiens
atggcgcccacggggctcctggtggccggcgcctccttcctcgcgttccgggggctgcactgggggttgcggcggctgcccacgccggaatcggccgctcgggaccgctggcagtggtggaacctctgcgtctccctggcgcacagcctgctctcggggaccggggcgctgctcggcctgtcactgtaccctcagatggccgccgaccccatccatggccacccgcgctgggctctggtgctggtggctgtgtctgtgggttacttcctggcagacggagctgacctgctgtggaaccagaccttgggcaagacctgggatcttctctgtcatcatttggtggtggtgagctgcctcagcaccgctgttctgtctggccactacgtgggcttctccatggtgtctctgctcctggaactgaactctgcctgcttgcacctgcggaagctgctgttgctttctcgccaggccccatccctggccttcagcgtgaccagctgggcctccttggccaccttggccctcttccgcctggtcccgctggggtggatgagtctgtggctgttccggcagcaccaccaggttcctcttgctctggtcaccctgggtggaattgggctggtcactgtgggcatcatgagcatcatattggggatccgtattctggtcaatgatgtcctacagtctcgaccccatccacccagccctggccatgagaaaaccagggggaccaggacacgtcgtgacaatggacctgtcaccagcaacagttcgactctcagcctgaaa

SEQ ID NO: 861 - DNA, 318 bp, Homo sapiens
atggcgactctcggctttgtgactccggaggccccctttgaatcatcgaagccccccatctttgaggggcttagccccactgtttacagcaatccagagggtttcaaggaaaagttccttcgcaagacccgcgagaatccggtggtacccataggtttcctgtgcacggcggccgtcctcaccaacggcctctactgcttccaccagggcaacagccaatgttcacggcttatgatgcacacccagatcgccgcccagggcttcaccattgcagccatcttgctgggtctagctgccaccgctatgaagtctccaccc

SEQ ID NO: 862 - DNA, 456 bp, Homo sapiens
ggagaggctctagggtcagcactgcaccctggaaccatcctcttagctcttctcattattccttcgtccatcttaccaccccttagcttctgtgagagatttttcttgaggctgaatagaaacgggcttcccaaagcccctgataaaccggaacgacattgctccctctttgtggatttgggcagcagtgagctaagaaaggacatttatatcaccgtgcacattatccgaatcggtcgaatgggagcaggagaaaaaaagaatgcctgtagtgtccagtaccgacgaccctttggctgtgcagttcttagcatcgctgacctgctaacaggagagacaaaggatgacctcattctgaaagtatacatgtgtaacacagagagtgagtggtaccaaatccatgagaacatcatcaaaaagctgaatgcacgttataacttgactggctccaatgca

SEQ ID NO: 863 - DNA, 186 bp, Homo sapiens
attctgcagattgttttgtattctcagggatttcacagtttattcctggggctctgtttgatgttacttctggctgcctcatgcctgccctttcctgggatcatgggactatcccatcgatccaacagagaagacagtcaagagtccactgctgatgcacctccacagaggtctctttatctgcca

SEQ ID NO: 864 - DNA, 876 bp, Homo sapiens
ggtaactggactgcagcggtgactgagtttgttctgctggggttttccctgagcagggaggtggagctgctgctcctggtgctcctgctgcccacgttcctgctgactcttctggggaacctgctcatcatctccactgtgctgtcctgctcccgcctccacacccccatgtacttcttcttgtgcaacctctctatcctggacatcctcttcacctcagtcatctctccaaaagtgttggccaacttaggatctagggataaaaccatctcctttgccggatgtatcacccagtgctatttctactttttcttgggcacagttgagttcctcctgctgacggtcatgtcctatgaccgttatgccaccatctgctgccccctgcggtacaccaccatcatgagaccttctgtctgcattgggaccgttgtattctcttgggtgggaggcttcctgtctgtgctctttccaaccatcctcatctcccagctgcccttctgtggctccaatatcattaaccacttcttctgtgacagtggacccttgctggccctggcctgtgcagacaccactgccatcgagctgatggattttatgctttcttccatggtcatcctctgctgcatagtcctcgtggcctattcctatacgtacatcatcttgaccatagtgcgcattccttctgcaagtggaaggaagaaggcctttaatacctgtgcttcccacctgaccatagtcatcattcctagtggcatcactgtgtttatctatgtgactccctcccagaaagaatatctggagatcaacaagatccctttggttctgagcagtgtggtgactccattcctcaacccctttatatatactctgaggaat

SEQ ID NO: 865 - DNA, 855 bp, Homo sapiens
ataactgtgctactgaagtacttgtgtgcagagtatggctggaggaatgccatgttgatccaaggcgccgtttccttaaacctgtttgtttttgggaccctcatgaggcccctccctcctgggaaaaacccaaatgacccagaagagaaagatctgcgcgtcctgcccgcgcactccacagagtctgtaatgtcaaatggacagcagggaagaatagaagagaaggatggcgggtctgggaacgaggagaccctctgtgacctgcaagcccaggagtgccccgatcaggccagatcatgtgcgcttgttctgaagacggtcagctggctcattatgagagtcaagaagggcttcgaggattggtactcaggctattttgggacactatttacaaatcgaatgtttgtagcctttgttttctgggcttcatttgcatacagcagctttgtcatctcctttattcatctcccagaaatcgtcaatttgtataacttattggagcaaacgaaggttttccctctgacttcaattatagcaatagttcacattgttggaaaagtgatcctgggcgtcatagctgacttaccttgcatcagtgtttggaatgtcttcctgttggccagcttcgttcttgtcctcatatttttaattctgcctttgatgcatatgtacgctggcctggtggtcatctgcacactgacagggttttccagcggttatttctccctaatgcccatagtgactgaagacttggttggcattgaacatttggccaatgcctacggcatcatcatctgtgctaatggcatctctgcgttgttgggaccaccttttgcaggtaaactgtctgaggtt

SEQ ID NO: 866 - DNA, 558 bp, Homo sapiens
aatggcggctggtccagctgggcagagtggtcaccctgctccaaccgctgtggccgaggctggcagaagcgcacccggacctgcaccaaccccgctccactcaacggaggggccttctgcgagggccaggcattccagaagaccgcctgcaccaccatctgcccagtcgatggggcgtggacggagtggagcaagtggtcagcctgcagcactgagtgtgcccactggcgtagccgcgagtgcatggcgcccccaccccagaacggaggccgtgactgcagcgggacgctgctcgactctaagaactgcacagatgggctgtgcatgcaaaataagaaaactctaagcgaccccaacagccacctgctggaggcctcaggggatgcggcgctgtatgcggggctcgtggtggccatcttcgtggtcgtggcaatcctcatggcggtgggggtggtggtgtaccgccgcaactgccgtgacttcgacacagacatcactgactcatctgctgccctgactggtggtttccaccccgtcaactttaagacggcaaggccc

SEQ ID NO: 867 - DNA, 792 bp, Homo sapiens
gccggcaccagctgccccgtcctttgcacatgccgtaaccaggtggtggattgtagcagccagcggctattctccgtgcccccagacctgccaatggacacccgaaacctcagcctggcccacaaccgcatcacagcagtgccgcctggctacctcacatgctacatggagctccaggtgctggatttgcacaacaactccttaatggagctgccccggggcctcttcctccatgccaagcgcttggcacacttggacctgagctacaacaatttcagccatgtgccagccgacatgttccaggaggcccatgggctagtccacatcgacctgagccacaacccctggctgcggagggtgcatccccaggcctttcagggcctcatgcagctccgagacctggacctcagttatgggggcctggccttcctcagcctggaggctcttgagggcctaccggggctggtgaccctgcagatcggtggcaatccctgggtgtgtggctgcaccatggaacccctgctgaagtggctgcgaaaccggatccagcgctgtacagcagattctcagctggctgagtgccggggccctcctgaagtcgagggcgccccgctcttctcactcactgaggagagcttcaaggcctgccacctgaccctgaccctggatgattacctattcattgcgttcgtgggcttcgtggtctccattgcttctgtggccaccaacttcctcctgggcatcactgccaactgctgccaccgctggagcaaggccagtgaagaggaagag

SEQ ID NO: 868 - DNA, 678 bp, Homo sapiens
tctgccagcaggaccatgtgtaccagcttgaccacttgtgagtggaagaaagtcttctatgagaagatggaggtggcaaagccagcggacagctgggagctcatcatagaccccaacctcaagcccagtgagctggcccctggctggaagcagtacctggagcagcacgcctcaggcaggttccactgctcctggtgctggcacacctggcagtctgcccatgtggtcatcctcttccacatgttcctggaccgcgcccagcgggcgggctcggtgcgcatgcgcgtcttcaagcagctgtgctatgagtgcggcacggcgcggctggacgagtccagcatgctggaggagaacatcgagggcctggtggacaacctcatcaccagcctgcgcgagcagtgctacgaggaggatggtggccagtaccgcatccacgtggccagccgcccggacagcgggccgcatcgtgcagagttctgtgaggcctgccaggagggcatcgttcactggaagcccagcgagaagctgctggaggaggaggtgaccacctacacctctgaagcctccaagccgagggcccaggcgggatccggctacaacttcttgtctcttcgctggtgcctcttctgggcctctctctgcctgctcgttgtttacctgcagttctccttcctcagt

SEQ ID NO: 869 - DNA, 255 bp, Homo sapiens
atgcagaggagcaatcatacagtgactgagtttatactgctgggcttcaccacagacccaggaatgcagctgggcctcttcgtggtgttcctgggcgtgtactctctcactgtggtaggaaatagcaccctcatcgtgttgatctgtaatgactcctgcctccacacacccatgtattttttcactggaaatctgtcgtttctggatctctggtattcttctgtctacaccccaaagatcctagtgacctgcatc

SEQ ID NO: 870 - DNA, 255 bp, Homo sapiens
aattctactttggtgacggaatttattctcttgggattaaaggatcttccagagcttcagcccatcctctttgtactgttcctgctaatctacctgatcactgtcggggggaaccttgggatgttggtgttgatcaggatagattcacacctccacacccccatgtatttctttcttgctagtttgtcctgcttggatttgtattactccactaatgtgactcccaagatgttggtgaacttcttctcagacaag

SEQ ID NO: 871 - DNA, 255 bp, Homo sapiens
atggctgaagttaatatcatttatgtcactgtattcattctgaaaggaattaccaaccggccagagcttcaggccccgtgctttggggtgtttttagttatctatctggtcacagtgctgggcaatcttgggttgattactttaatcaagattgatactcgactccacacacctatgtactatttcctcagccacctggcctttgttgacctttgttactcctctgctattacaccgaagatgatggtgaatttt

SEQ ID NO: 872 - DNA, 789 bp, Homo sapiens
atgaggatttttagaccgtggagactgcgctgccctgccctgcacctaccctcactctccgtgttctcactaaggtggaaattgccttccctcactactgacgagaccatgtgtaaaagcgtgaccacagatgagtggaagaaagtcttctatgagaagatggaggaggcaaagccggctgacagctgggacctcatcatagaccccaacctcaagcacaatgtgctgagccctggttggaagcagtacctggaattgcatgcttcaggcaggttccactgctcctggtgctggcacacctggcagtcgccctacgtggtcatcctcttccacatgttcctggaccgcgcccagcgggcgggctcggtgcgcatgcgcgtcttcaagcagctgtgctatgagtgcggcacggcgcggctggacgagtccagcatgctggaggagaacatcgagggcctggtggacaacctcatcaccagcctgcgcgagcagtgctacggcgagcgtggcggccagtaccgcatccacgtggccagccgccaggacaaccggcggcaccgcggagagttctgcgaggcctgccaggagggcatcgtgcactggaagcccagcgagaagctgctggaggaggaggcgaccacctacaccttctcccgggcgcccagccccaccaagtcgcaggaccagacgggctcaggctggaacttctgctctatcccctggtgcttgttttgggccacggtcctgctgctgatcatctacctgcagttctctttccgtagctccgta

SEQ ID NO: 873 - DNA, 906 bp, Homo sapiens
gataattttacagttgtcactgagtttattcttttgggattgacagatcatgctgaactaaaagctgtgctttttgtggtgttcctggtgatttacgccattaccttgttgaggaatctgggcatgatcctcttaatccaaatcacctccaaactccacacacccatgtactttttactcagctgtctttcatttgtggatgcctgctattcatctgcaattgcacccaaaatgctggtgaacctcctggttgtgaaggcaacaatttctttctctgcttgcatggtacagcatttgtgtttcggagtgttcatcaccacagaaggcttcttactgtcagtgatggcctatgaccgctatgtggccattgtgagtcccttgctttacactgtagccatgtctgatagaaagtgtgtggagcttgtcacaggatcatggataggtggaatagttaacacattaatccacacaatcagcttgaggagactgtccttttgtaggctaaatgctgtcagccacttcttctgtgacattccttcactgctaaagctgtcatgttctgacacctccatgaatgagttgttgctgttaaccttctccggagtcattgccatggccaccttcttgactgtgatcatttcctacatcttcattgcttttgctagcctaaggatccactcagcatcaggcagacagcaagccttctccacctgtgcctctcacctgactgctgtgaccatattctatggtaccttaatctttagctacattcagccaagctcccagtattttgtggaacaagagaaagtggtttctatgttctatacgctagggattcccatgttaaacctgttgatacacagtttgagaaacaaggacgtaaaggaggcagtgaaaagggccata

SEQ ID NO: 874 - DNA, 903 bp, Homo sapiens
aatcatacaggtgcaaaggaattcctcctggtagggttaactgaaaatcctaatttgcagatcccactctttttgcttgtcactctgatttatttcatcactttgttggataatttgggtataattattttaatctggttaaatgcccaacttcatactccaatgtacttcttccttggcaacctctccttttgtgatatctgctactctactgtctttgctcctaagatgctagtcaatttcctatcaaaacataagtccagtacattttctggctgtgttctacagagtttcccttttgcagtatatgtaaccacaaaggacattctcctgtccatgatggcttatgaccattacgtggccatagctaatcccttgttgtatacagtcattatggcccaaaaagtttgtattcagatggtccttgcttcttacttaggtgggctcattaattccctgacacacacaataggtttgctcaaattagacttctgtggtcctaatattgtgaatcattatttctgtgatgttcctcctcttctgaggctttcttgctctgatgctcatatcaatgaaatgctgcccttggtcttctctgggctcattgcaatgttcactttcattgtcattatggtgtcttatatctgcatcatcattgccatccagagaatccatgcagctgagggaaggtacaaagccttctccacttgtgtctcccacctaaccacggtgaccttattctatgggtctgtttcttttagttatatccagccaagttctcagtattccttggaacaggagaaggtcttggctgtgttttatacactggtgatccccatgctaaacccacttatttatagcctgagaaataaggatgtaaaagatgcagccaaaaggttgata

SEQ ID NO: 875 - DNA, 255 bp, Homo sapiens
aatgtgactacaataatggaatttgttcttttggggttttctgatattcccaatctccactggatgctttttagtatatttttacttatgtatttgatgatcctgatgtgcaatggcatcataatactactaataaaaattcaccccgctctccagactcccatgtatttttttcttagcaatttttcccttttggaaatctgttatgtaacaatcattatcccaagaatgctcatggacatttggactcagaaa

SEQ ID NO: 876 - DNA, 672 bp, Homo sapiens
atgaacatcgaggtggggaacatttcttatacaggagccatcatctcctggtcgtcctcggagccctgcctggaggactattaccatattatgtacaggcccaactggaacagcatcttctctggctatcttcgctacagcttccaccacgaggagaaggtgcctcgaacgatcagctccgtggtgctggaacatcttgccccttccactctctacttcctgtgcatcagctgtaagaaggctgccttcccttacaggcactactgcaccatgttccacaccctggataagagtccgctggctcctggaagctccctggtagacccccagatctccctttgggtgctgatggccattctgctggcctgcttcacagccgtcttggccttcatctgcctccagttctggtgtgtccgttgccatgagccgcgatggtcttacagggctggccacatggaggaggccaatgggttggtgagatggccagaggaggccccggatcttggtcagagggaggaagacctgcaggggctccccctggtggaaatgccacgcaagaactccagagatggagctgaactggatcccgaagccaaccaggatgcccctgatgcgggtgccttacagagggggggtggtgacccacccgctatactgcctcattgtggggaa

SEQ ID NO: 877 - DNA, 255 bp, Homo sapiens
ttctcccgagtgggcagcagcagcttctggggtggcctgggcggaggctatggtggggccagcggcatcggaggcatcaccgccgtcatggtcaaccagagcaaatttgtctccttcatcgacaaggtaccgttcctggagcagcagaacaagatgctggagaccaagtggagcctcctgcagcagcaggagatggctcagagcaacatggacaacatgttcgagagctacatcaacaaccttaggcggcagctg

SEQ ID NO: 878 - DNA, 636 bp, Homo sapiens
gtggacatttgttactcttcagtcacagctcccaagatgattgttgacctgttagcaaaggacaaaaccatctcctatgtggggtgcatgttgcaactgcttggagtacatttctttggttgcactgagatcttcatccttactgtaatggcctatgatcgttatgtggctatctgtaaacccctacattatatgaccatcatgaaccgggagacatgcaataaaatgttattagggacgtgggtaggtgggttcttacactccattatccaagtggctctggtagtccaactacccttttgtggacccaatgagatagatcactacttttgtgatgttcaccctgtgttgaaacttgcctgcacagaaacatacattgttggtgttgttgtgacagccaacagtggtaccattgctctggggagttttgttatcttgctaatctcctacagcatcatcctagtttccctgagaaagcagtcagcagaaggcaggcgcaaagccctctccacctgtggctcccacattgccatggtcgttatctttttcggcccctgtacttttatgtacatgcgccctgatacgaccttttcagaggataagatggtggctgtattttacaccattatcactccc

SEQ ID NO: 879 - DNA, 810 bp, Homo sapiens
atgcaggtctgggctaggaggagaaaactacctgctgggatcctgaaagtttgcaaggaagtctccctctgtgatgataaatcggccagcaaagaaaaatccaagaaaccagtaagatttctaccacagctgtctatggtaatttaccaatataccatcatacttcattcctttatgataatgtttgtttactacttttcaagcttgaaagtgagtacaaagccccactggcagcaggcagctccatcattccatttgagtgtaaagcaggatgatgagagtccagaaccatttagtgttaaaaatgaacagtcccatgctgaatacatggaacgttttggaaaaaagggcaaattaccccaccaagttgatgatagttatgttggaccatctacttccaaatcaaagggcaaatctccacataaagaacgagaaaactttagaagtactcttgttaatgtcattatgcaacaagatgctgacttagactcagctgtccctgatggaagcacaattccaaaaccgaccgcttctgctatagagaaagacatcttgagatattactattatattcaccatggaattgatacagaccatgtagccccaatggaagattcttggctagaacacgtactggatttagttccacaacatctgaaagtcttcactgacagcatagttacattatctgatgaaatgagagaggattatcttcttagtgtaaggaaatccatagttgattttgttttaaaagatcctcgagagaaaggagatgataagaagacagatgaacttccagcccatcgtgct

SEQ ID NO: 880 - DNA, 639 bp, Homo sapiens
ttaatagatgctgtattatccaccaccatttctcccatattgattgtagacctactctgtgacaaaaagactatttccttcccagcttgcatgggccagctatttacagaccacttgtttggtggaactgagatcttccttctggtggtgatggcctatgatcgctacgtggccatctgtaagccactgcactatttaaccatcatgaatcgacaggtttccatccttctgttggtggtggccatgactggaggtttccttcattctgtgtttcaaattgctgttctgtacagtctccctttctgtggccccaatgtcattgaccactttttctgtgacatgtacccattattggaactggcgtgcactgacacctactctataggcctcactgtagttttcagtggtggagcaatgtgtatggtcatcttcgcccttctactaatctcctatggagtcagcctaaactcccttaaaacttatagtcaggaagggaggcgtaaagccctgtctacctgcagctcgcacatcaccgtggttgtcctcttttttgttccctgtattttcatgtatgttagacctgtctcaaacttccctattgataaattcgttactgtgttttatacagttatcacaccc

SEQ ID NO: 881 - DNA, 255 bp, Homo sapiens
atggacactaccatggaagctgacctgggtgccactggccacaggccccgcacagagcttgatgatgaggactcctacccccaaggtggctgggacacggtcttcctggtggccctgctgctccttgggctgccagccaatgggttgatggcgtggctggccggctcccaggcccggcatggagctggcacgcgtctggcgctgctcctgctcagcctggccctctctgacttcttgttcctggcagcagcggcc

SEQ ID NO: 882 - DNA, 756 bp, Homo sapiens
atgaaggttttagccactagttttgtccttgggagcctggggttggccttctacctgcctttggtggtgactacacctaaaacactggccatccctgagaagctgcaagaagctgtggggaaagttatcatcaatgccacaacctgtactgtcacctgtggccttggctataaggaggagaccgtctgtgaggtgggccctgatggagtgagaaggaaatgtcagactcggcgcttagaatgtctgaccaactggatctgtgggatgctccatttcaccattctcattggcaaggaatttgagcttagctgtctgagttcagacatcttggagtttggacaggaagctttccggttcacctggagacttgctcgaggtgtcatctccactgacgatgaggtcttcaaaccctttcaagccaactcccactttgtgaagtttaaatatgctcaggagtatgactctgggacatatcgctgtgatgtgcagctggtaaaaaacttgagactcgtcaagaggctctattttgggttgagggtccttcctcctaacttggtgaatctgaatttccatcagtcacttactgaggatcagaagttaatagatgagggattggaagttaatctggacagctactccaagcctcaccacccaaagtggaaaaagaaggtggcgtcagccttgggaataggaattgccattggagtggttggtggcgtgttggtgaggattgtcctctgtgcgctaagggggggc

SEQ ID NO: 883 - DNA, 612 bp, Homo sapiens
aagtgctctggttgtacatggaggatgaccgaaaaaaccaatggtgtgaagagctccccagccaataatcacaaccatcatgcacctcctgccatcaaggccaatggcaaagatgaccacaggacaagcagcaggccacactctgcagctgacgatgacacctcctcagaactgcagaggctggcagacgtggatgccccacagcagggaaggagtggcttccgcaggatagttcgcctggtggggatcatcagagaatgggccaacaagaatttccgagaggaggaacctaggcctgactcattcctcgagcgttttcgtgggcctgaactccagactgtgaccacacaggagggggatggcaaaggcgacaaggatggcgaggacaaaggcaccaagaagaaatttgaactatttgtcttggacccagctggggattggtactactgctggctatttgtcattgccatgcccgtcctttacaactggtgcctgctggtggccagagcctgcttcagtgacctacagaaaggctactacctggtgtggctggtgctggattatgtctcagatgtggtctacattgcggacctcttcatccgattgcgcaca

SEQ ID NO: 884 - DNA, 255 bp, Homo sapiens
atgctgggtccagcttataaccacacaatggaaacccctgcctccttcctccttgtgggtatcccaggactgcaatcttcacatctttggctggctatctcactgagtgccatgtacatcatagccctgttaggaaacaccatcatcgtgactgcaatctggatggattccactcggcatgagcccatgtattgctttctgtgtgttctggctgctgtggacattgttatggcctcctcggtggtacccaagatg

SEQ ID NO: 885 - DNA, 891 bp, Homo sapiens
ctgggactctcaggggatccagaactgcagccggtccttgctttgctgtccctgtccctgtccatgtatctggtcacggtgctgaggaacctgctcatcatcctggctgtcaaccctgactcccacctccacacccccatgtacttcttcctctccaacctgtgctgggctaacctcagtttcacctcggccacggttcccaagatgactgtggacatgcagttgcatagcagagtcatctctcatgcgggctgcctgacacagatgtctttcttggtcctttttgcatgtatagaagacatgctcctgaccatgatggcctatgactgctttgtagccatctgtcgccctctgcactacccagtcattgtgaatcctcaccctctgtgtcttcttcatttggtgtcctttttccttagcctgttggattcccagctgcacagttggattgtgttacaattcaccatcttcaagaatgtggaaatctctacttttgtctgtgagccatctcaacttctcaaccttgcctgttctgacagtgtcatcaatagaatattcatgtatttcgatagtactatgtttggttttcttcccatttcagggttccttttgtctttctataaaattgtcccctccattctaaggatgtcatcatcagatgggaagtataaagcccttgccacctgtggctctcacctggcagttgtttgcttattttatggaacaggcattggcgtgcacctgacttcagctgtggcaccaccccccaggaatggtgtggtggcgtcagtgatgtacgctgtggtcacccccatgctgaaccctttcatctacagcctgagaaacagggacattcaaagtgccctgcagaggctgcgcagcacaacagtc

SEQ ID NO: 886 - DNA, 660 bp, Homo sapiens
atgggggagtgggcgttcctgggctcgctgctggacgccgtgcagctgcagtcgccgctcgtgggccgcctctggctggtggtcatgctgatcttccgcatcctggtgctggccacggtgggcggcgccgtgttcgaggacgagcaagaggagttcgtgtgcaacacgctgcagccgggctgtcgccagacctgctacgaccgcgccttcccggtctcccactaccgcttctggctcttccacatcctgctgctctcggcgcccccggtgctgttcgtcgtctactccatgcaccgggcaggcaaggaggcgggcggcgctgaggcggcggcgcagtgcgcccccggactgcccgaggcccacgtggcgctgcgcctgctggccgagctgaccttcctgggcggccaggcgctgctctacggcttccgcgtggccccgcacttcgcgtgcgccggtccgccctgcccgcacacggtcgactgcttcgtgagccggcccaccgagaagaccgtcttcgtgctcttctatttcgcggtggggctgctgtcggcgctgctcagcgtagccgagctgggccacctgctctggaagggccgcccgcgcgccggggagcgtgacaaccgctgcaaccgtgcacacgaagaggcgcagaagctgctc

SEQ ID NO: 887 - DNA, 354 bp, Homo sapiens
atcttatccatagaacagctcatcagccgggttggtgtgattggagtgactctcatggctcttctttctggatttggtgctgtcaactgcccatacacttacatgtcttacttcctcaggaatgtgactgacacggatattctagccctggaacggcgactgctgcaaaccatggatatgatcataagcaaaaagaaaagactgagaggaccaggagtggtaggtttcctgttgacttattcacctgtaggacagattacagaagatcttactcttattcaacaggaagtggatgctttggaagaattaagcaggcagctttttctggaaacagctgatctatatgctaccaag

SEQ ID NO: 888 - DNA, 255 bp, Homo sapiens
atggttctctgttgtagaggttctctgttgtggatggttctctgttgtggatggttctctgttatagagggtctctgttgtggagggtctctgttgtggatggttctctgttgtgggtgggtctctgttgtgggtgggtctctgttgtggagggttctctgttgtggagggttctctgttgtggagggttctctgttgtggagggtctctgttggggatggttctctgttgtggaggctctctgttgtggaggtt

SEQ ID NO: 889 - DNA, 255 bp, Homo sapiens
atgagggctctgggatattcacagtggaaggggacaattggatttctttacagtcaattctctgttcttcgttcaataggtgaaagggagtgtgaacaatgtggtgaagactattggtcaaatgcacaaaagagcgagtgtgtgctgaaagaggtggaataccttgcttatgatgaggccctgggattcacacttgtcattctttctgtctttggggcatttgtggtcttggcagtcacagctgtgtatgtgata

SEQ ID NO: 890 - DNA, 255 bp, Homo sapiens
gaatttcgggagtttgagaatggctccatctgtgtggagtgtgacccccagtgtgagaagatggaagatggcctcctcacatgccatggaccgggtcctgacaactgtacaaagtgctctcattttaaagatggcccaaactgtgtggaaaaatgtccagatggcttacagggggcaaacagtttcattttcaagtatgctgatccagatcgggagtgccacccatgccatccaaactgcacccaaggaactccc

SEQ ID NO: 891 - DNA, 255 bp, Homo sapiens
atgagctggagcttcctgacgcggctgctggaggagatccacaaccactccaccttcgtgggcaaggtgtggctcacggtgctggtggtcttccgcatcgtgctgacggctgtgggcggcgaggccatctactcggacgagcaggccaagttcacttgcaacacgcggcagccaggctgcgacaacgtctgctatgacgccttcgcgcccctgtcgcacgtgcgcttctgggtcttccagattgtggtcatctcc

SEQ ID NO: 892 - DNA, 255 bp, Homo sapiens
atgaaggtgaaggaggagaaggctggggtaggaaagctggaccacactaaccacaggaggagatttccggatcagaaagaatgccctcctatccacattgggcttccagtacccacttaccctcaaagaaaaactgaccagaagggacatctttcaggcctgcaaaaagtccactggggcctgcggccagaccagccacagcaggaactgactggcccagggagtggggcaagcagccaggacagcagcatggat

SEQ ID NO: 893 - DNA, 255 bp, Homo sapiens
atgtccactcccggggtcaattcgtccgcctccttgagccccgaccggctgaacagcccagtgaccatcccggcggtgatgttcatcttcggggtggtgggcaacctggtggccatcgtggtgctgtgcaagtcgcgcaaggagcagaaggagacgaccttctacacgctggtatgtgggctggctgtcaccgacctgttgggcactttgttggtgagcccggtgaccatcgccacgtacatgaagggccaatgg

SEQ ID NO: 894 - DNA, 255 bp, Homo sapiens
atggacgtgggggaggagccgctggagaaggcggcgcgcgcccgcactgccaaggaccccaacacctataaagtactctcgctggtattgtcagtatgtgtgttaacaacaatacttggttgtatatttgggttgaaaccaagctgtgccaaagaagttaaaagttgcaaaggtcgctgtttcgagagaacatttgggaactgtcgctgtgatgctgcctgtgttgagcttggaaactgctgtttagattaccag

SEQ ID NO: 895 - DNA, 255 bp, Homo sapiens
atgccccaggccctggagcgtgcagatggcagctgggcctgggtggtgctgctggccaccatggtgacccagggcctcaccctgggcttccccacgtgtatcggcatcttcttcactgaattgcaatgggagttccaggccagcaacagcgagacctcttggttcccctccatcctcacggctgtgctccacatggcagggcccctgtgcagcatcctggtgggacgcttcggctgccgagtgaccgtgatgctg

SEQ ID NO: 896 - DNA, 255 bp, Homo sapiens
tcccgcctccggggttcccgtcgttttctgagcggcttcgtggctggggctgtagtgggcgctgcgggagctctcgcggccctgcagttcttccggagtcagggcgctgagggagcgttgacagggaagcagccggatggatctgcagaaaaggctgtcttggaacaatttggattccctttaactggaacagaggcaaggtgttacactaatcacgctttgtcttatgatcaggcaaagcgggtgcctagatgg

SEQ ID NO: 897 - DNA, 255 bp, Homo sapiens
atggagaatagtcttagatgtgtttgggtacccaagctggcttttgtactcttcggagcttccttgttcagcgcgcatcttcaagtaaccggttttcaaattaaagctttcacagcactgcgcttcctctcagaaccttctgatgccgtcacaatgcggggaggaaatgtcctcctcgactgctccgcggagtccgaccgaggagttccagtgatcaagtggaagaaagatggcattcatctggccttgggaatg

SEQ ID NO: 898 - DNA, 255 bp, Homo sapiens
atgtgggggcgactgctcctgtggcccctggtgctggggttcagcctgtctggcggcacccagacccccagcgtctacgacgagagcgggagcaccggaggtggtgatgacagcacgccctcaatcctgcctgccccccgcggctacccaggccaagtctgtgccaatgacagtgacaccctggagctcccggacagctcacgggcactgcttctgggctgggtgcccaccaggctggtgcccgccctctatggg

SEQ ID NO: 899 - DNA, 255 bp, Homo sapiens
atgcggctgtggaaggcggtggtggtgactttggccttcatgagtgtggacatctgcgtgaccacggccatctatgtcttcagccacctggaccgcagcctcctggaggacatccgccacttcaacatctttgactcggtgctggatctctgggcagcctgcctgtaccgcagctgcctgctgctgggagccaccattggtgtggccaagaacagtgcgctggggccccggcggctgcgggcctcgtggctggtc

SEQ ID NO: 900 - DNA, 255 bp, Homo sapiens
atggcagtgggtgagcccctggtgcacatcagggtcactcttctgctgctctggtttgggatgtttttgtctatttctggccactctcaggccaggccctcccagtatttcacttctccagaagtggtgatccctttgaaggtgatcagcaggggcagaggtgcaaaggctcctggatggctctcctatagcctgcggtttgggggacagagatacattgtccacatgagggtaaataagctgttgtttgctgca

SEQ ID NO: 901 - DNA, 291 bp, Homo sapiens
atgaaggtctccgcagcacttctgtggctgctgctcatagcagctgccttcagcccccaggggctcgctgggccagcttctgtcccaaccacctgctgctttaacctggccaataggaagataccccttcagcgactagagagctacaggagaatcaccagtggcaaatgtccccagaaagctgtgatcttcaagaccaaactggccaaggatatctgtgccgaccccaagaagaagtgggtgcaggattccatgaagtatctggaccaaaaatctccaactccaaagcca

SEQ ID NO: 902 - DNA, 255 bp, Homo sapiens
atgcggcaggtttgctgctcagcgctgccgccgccgccactggagaagggtcggtgcagcagctacagcgacagcagcagcagcagcagcgagaggagcagcagcagcagcagcagcagcagcgagagcggcagcagcagcaggagcagcagcaacaacagcagcatctctcgtcccgctgcgcccccagagccgcggccgcagcaacagccgcagccccgcagccccgcagcccggagagccgccgcccgttcg

SEQ ID NO: 903 - DNA, 576 bp, Homo sapiens
atggccgggttgctggcgttgctgggtccggcaggcagggtgggcgcccgggtccggcctcgcgccacctggctcctgggcgccaccgccccctgcgccccgccgcccctggccctggccctgctcccgcccaggctagacgcccggctgctccgcacggcgcgcggggactgccgcggccaccaggaccccagccaggccacggggacaacaggcagcagcgtcagctgcacagaggagaaaaagcaaagcaagtcacagcaactgaaaaagatttttcaagagtatggcactgttggcgtgtcattgcacattggaatctcattaatttccttgggcatattttacatggttgtgtcaagtggtgtggacatgcctgcaatcctgctgaaactcggatttaaagagtccctggtacagtcaaaaatggcagcaggcacaagtaccttcgtggtggcctatgcaatccacaagctgtttgcgccagtgagaatcagcattacgctagtctctgtgcccttgattgtcagatattttcgaaaagtgggattttttaaacctccagctgcaaaacct

SEQ ID NO: 904 - DNA, 255 bp, Homo sapiens
aaaaggggagcgcggagaggaggctggaagaggaagatgcctagcacagaccttctgatgttgaaggcctttgagccctacttagagattttggaagtatactccacaaaagccaagaattatgtaaatggacattgcaccaagtatgagccctggcagctaattgcatggagtgtcgtgtggaccctgctgatagtctggggatatgagtttgtcttccagccagagagtttatggtcaaggtttaaaaagaaa

SEQ ID NO: 905 - DNA, 255 bp, Homo sapiens
tttgttttgttttgttttgttttttcagtttctctgcaggtggatattgttcccagccagggggagatcagcgttggagagtccaaattcttcttatgccaaggcaatagcttaaaaataatctcttcctctttagtggcaggagatgccaaagataaagacatctcctggttctcccccaatggagaaaagctcaccccaaaccagcagcggatctcagtggtgtggaatgatgattcctcctccaccctcacc

SEQ ID NO: 906 - DNA, 255 bp, Homo sapiens
atggggttttggatcttagcaattctcacaattctcatgtattccacagcagcaaagtttagtaaacaatcatggggcctggaaaatgaggctttaattgtaagatgtcctagacaaggaaaacctagttacaccgtggattggtattactcacaaacaaacaaaagtattcccactcaggaaagaaatcgtgtgtttgcctcaggccaacttctgaagtttctaccagctgcagttgctgattctggtatttat

SEQ ID NO: 907 - DNA, 903 bp, Homo sapiens
ggatctcatagatcagaatatactggagcctgtaacccgtgcacagagggtgtggattacaccattgcttccaacaatttgccttcttgcctgctatgtacagtttgtaaatcaggtcaaacaaataaaagttcctgtaccacgaccagagacaccgtgtgtcagtgtgaaaaaggaagcttccaggataaaaactcccctgagatgtgccggacgtgtagaacagggtgtcccagagggatggtcaaggtcagtaattgtacgccccggagtgacatcaagtgcaaaaatgaatcagctgccagttccactgggaaaaccccagcagcggaggagacagtgaccaccatcctggggatgcttgcctctccctatcactaccttatcatcatagtggttttagtcatcattttagctgtggttgtggttggcttttcatgtcggaagaaattcatttcttacctcaaaggcatctgctcaggtggtggaggaggtcccgaacgtgtgcacagagtccttttccggcggcgttcatgtccttcacgagttcctggggcggaggacaatgcccgcaacgagaccctgagtaacagatacttgcagcccacccaggtctctgagcaggaaatccaaggtcaggagctggcagagctaacaggtgtgactgtagagttgccagaggagccacagcgtctgctggaacaggcagaagctgaagggtgtcagaggaggaggctgctggttccagtgaatgacgctgactccgctgacatcagcaccttgctggatgcctcggcaacactggaagaaggacatgcaaaggaaacaattcaggaccaactggtgggctccgaaaagctcttttatgaagaagatgaggcaggctctgctacgtcctgcctg

SEQ ID NO: 908 - DNA, 135 bp, Homo sapiens
atgataaatatcacagcaactcaattcaagaaaaggacatactatttgagtttttggttttttcttttccgcctcaccgtgcttcttgttcactacttcttccagctttttctcatcccaattatccatagtatc

SEQ ID NO: 909 - DNA, 255 bp, Homo sapiens
atgccggtccgcaggggccacgtcgctccccaaaacacttacctggacaccatcatccgcaagttcgagggccaaagtcggaagttcctgattgccaatgctcagatggagaactgcgccatcatttactgcaacgacggcttctgcgaactcttcggctactcccgagtggaggtgatgcagcaaccctgcacctgcgacttcctcacaggccccaacacaccaagcagcgccgtgtcccgcctagcgcaggcc

SEQ ID NO: 910 - DNA, 255 bp, Homo sapiens
atgggctccccaggggctacgacaggctgggggcttctggattataagacggagaagtatgtgatgaccaggaactggcgggtgggcgccctgcagaggctgctgcagtttgggatcgtggtctatgtggtagggtgggctctcctcgccaaaaaaggctaccaggagcgggacctggaaccccagttttccatcatcaccaaactcaaaggggtttccgtcactcagatcaaggagcttggaaaccggctgtgg

SEQ ID NO: 911 - DNA, 387 bp, Homo sapiens
atgaccaggaactggtgggggggcgccctgcagaggctgctgcagtttgggatcgtcgtctatgtggtagggtgggcgctcctcgccaaaaaaggctaccaggagcgggacctggaaccccagatttccatcacaaccaaactcaaaggggtttccgtgactcagatcaaggagcttggaaaccggctgtgggatgtggccgacttcgtgaagccacctcagggtgtatgtagccccagtgaacacctgcccagagcacagctgtcttccagtcaatgcaagcccagccaggccaactttgagacttgcctcctagggagagaacgtgttcttcttggtgaccaacttccttgtgacgccagcccaagatcagggcagatgcccaga

SEQ ID NO: 912 - DNA, 255 bp, Homo sapiens
gcggcggcggcgggggcagggaaccgggcagcggtggcggtggcggtggcgcgggcggacgaggcggaggcgcccttcgccgggcagaactggttaaagtcctatggctatctgcttccctatgactcacgggcatctgcgctgcactcagcgaaggccttgcagtcggcagtctccactatgcagcagttttacgggatcccggtcaccggtgtgttggatcagacaacgatcgagtggatgaagaaaccccga

SEQ ID NO: 913 - DNA, 831 bp, Homo sapiens
atgtgcgtgggggctcggcggctgggccgcgggccgtgtgcggctctgctcctcctgggcctggggctgagcaccgtgacggggctccactgtgtcggggacacctaccccagcaacgaccggtgctgccacgagtgcaggccaggcaacgggatggtgagccgctgcagccgctcccagaacacggtgtgccgtccgtgcgggccgggcttctacaacgacgtggtcagctccaagccgtgcaagccctgcacgtggtgtaacctcagaagtgggagtgagcggaagcagctgtgcacggccacacaggacacagtctgccgctgccgggcgggcacccagcccctggacagctacaagcctggagttgactgtgccccctgccctccagggcacttctccccaggcgacaaccaggcctgcaagccctggaccaactgcaccttggctgggaagcacaccctgcagccggccagcaatagctcggacgcaatctgtgaggacagggaccccccagccacgcagccccaggagacccagggccccccggccaggcccatcactgtccagcccactgaagcctggcccagaacctcacagggaccctccacccggcccgtggaggtccccgggggccgtgcggttgccgccatcctgggcctgggcctggtgctggggctgctgggccccctggccatcctgctggccctgtacctgctccggagggaccagaggctgccccccgatgcccacaagccccctgggggaggcagtttccggacccccatccaagaggagcaggccgacgcccactccaccctggccaagatc

SEQ ID NO: 914 - DNA, 255 bp, Homo sapiens
atggcggggccgacggaggccgagacggggttggccgagccccgggccctgtgcgcgcagcggggccaccgcacctacgcgcgccgctgggtgttcctgctcgcgatcagcctgctcaactgctccaacgccacgatcaactggctgtcactggtctacctcgtggtatccaccccatttggcgtggcggccatctggatcctggactccgtcgggctccgtgcggcgctcggtgtctataccatccctgctggc

SEQ ID NO: 915 - DNA, 255 bp, Homo sapiens
atgaaaaagcacgactttgctgaaaacctgccttcatctttactaatcatcatactagtcatctttactctcagtggctcaaaatttgggcggggaactggactcactcagccttctcaacgcacgtctgctcggagatcatttgggagatccaagagattcagtatcactcgctcccttgatgatcttgctgtctgtgctggtcccgcagagttgacgggcgccgacctgaaggactgcgtcagcaacaacagc

SEQ ID NO: 916 - DNA, 255 bp, Homo sapiens
atggtcttgcttctttgtctatcttgtctgattttctcctgtctgaccttttcctggttaaaaatctgggggaaaatgacggactccaagccgatcaccaagagtaaatcagaagcaaacctcatcccgagccaggagccctttccagcctctgataactcaggggagacaccgcagagaaatggggagggccacactctgcccaagacacccagccaggccgagccagcctcccacaaaggccccaaagatgcc

SEQ ID NO: 917 - DNA, 255 bp, Homo sapiens
tctctctgtgcccggttcgacctgtcgcagcttgccaaactgagaagtgtgctcttctacacagcttgtctcgatcccaattttccagccacgctattcaaagacaagatgaaatgcactgtgaataaccagcaatcaaagaaaatcatggtggcagcagatattgtgacgatattcaacctgatccaaatgaatggcggggctgccaaggagaagctgcccacgggccgccagaaggtacgcaagaaggaggca

SEQ ID NO: 918 - DNA, 255 bp, Homo sapiens
aagctgggaaccagcgccttcagtgaggtggtcactgtgaacactttagcattccctattacaactccagaacccctggtgctggtcaccccaccgaggtgcctcatagccaatcggactcagcagggtgtgctcctgtcctggcttccgcctgccaaccacagctttcccatcgaccgctacatcatggagttccgtgtcgcagagcgctgggagttgctcgacgatggcatccccggcaccgaaggagagttc

SEQ ID NO: 919 - DNA, 255 bp, Homo sapiens
atggcttgttggcctcagctgaggttgctgctgtggaagaacctcactttcagaagaagacaaacatgtcagctgctgctggaagtggcctggcctctatttatcttcctgatcctgatctctgttcggctgagctacccaccctatgaacaacatgaatgccattttccaaataaagccatgccctctgcaggaacacttccttgggttcaggggattatctgtaatgccaacaacccctgtttccgttacccg

SEQ ID NO: 920 - DNA, 255 bp, Homo sapiens
atggcggaccgtggcggcgtgggtgaagccgcagctgttggagcgtctcctgcatctgtccctggcctaaacccgacgctaggctggagggagcgactgcgggccgggctggcggggactggggcctcgttgtggttcgtggcggggctggggctgctttacgccctgaggatccctttgaggctgtgtgagaatttggcagcggtgactgtatttttaaattcattgacacccaaattctatgtggcacttaca

SEQ ID NO: 921 - DNA, 255 bp, Homo sapiens
atgtcatggtttagtggcctcctggtccctaaagtggatgaacggaaaacagcctggggtgaacgcaatgggcagaagcgttcgcggcgccgtggcactcgggcaggtggcttctgcacgccccgctatatgagctgcctccgggatgcagagccacccagccccacccctgcgggcccccctcggtgcccctggcaggatgacgccttcatccggaggggcggcccaggcaagggcaaggagctggggctgcgg

SEQ ID NO: 922 - DNA, 255 bp, Homo sapiens
ttgtattttagcctctggaaaggggtgaagacatcaggaaaggtatggattgatgccgcaactcagatatttttttccttgggggctggatttggagtattgattgcatttgccagttacaacaaatttgacaacaactgttacagggatgccctgctgaccagcagcatcaactgtatcaccagcttcgtctctgggttcgccatcttctccatccttggttacatggcccatgaacacaaggtcaacattgag

SEQ ID NO: 923 - DNA, 255 bp, Homo sapiens
atgcggggaggcaggggcgcccctttctggctgtggccgctgcccaagctggcgctgctgcctctgttgtgggtgcttttccagcggacgcgtccccagggcagcgccgggccactgcagtgctacggagttggacccttgggcgacttgaactgctcgtgggagcctcttggggacctgggagccccctccgagttacacctccagagccaaaagtaccgttccaacaaaacccagactgtggcagtggcagcc

SEQ ID NO: 924 - DNA, 423 bp, Homo sapiens
atggagacagcgggcgctgcaactgggcagccggcctctgggctggaggctccggggtccacgaatgaccggcttttcctggttaaaggtggaattttccttggtaccgttgctgcagcgggaatgctagctggatttattacaacattatcattggctaaaaagaaaagccctgaatggttcaataagggaagtatggccacggctgcattaccggaaagcgggtcttcccttgccttgcgagctctgggctggggctccctgtatgcatggtgtggggttggtgtgattagcttcgcagtctggaaagctttaggagttcacagtatgaacgactttcgaagtaaaatgcaatcaatatttccaacaattcccaagaactccgaatcggctgttgagtgggaggaaacattgaaatccaaa

SEQ ID NO: 925 - DNA, 255 bp, Homo sapiens
atggacctcgcgggactgctgaagtctcagttcctgtgccacctggtcttctgctacgtctttattgcctcagggctaatcatcaacaccattcagctcttcactctcctcctctggcccattaacaagcagctcttccggaagatcaactgcagactgtcctattgcatctcaagccagctggtgatgctgctggagtggtggtcgggcacggaatgcaccatcttcacggacccgcgcgcctacctcaagtat

SEQ ID NO: 926 - DNA, 255 bp, Homo sapiens
cggagaggcggctgcggagcgctcgggctgctgctgctgctgctgggcgccgcgtgcctgataccgcggagcgcgcaggtgaggcggctggcgcgctgccccgccacttgcagctgtaccaaggagtctatcatctgcgtgggctcttcctgggtgcccaggatcgtgccgggcgacatcagctccctgagcctggtaaatgggacgttttcagaaatcaaggaccgaatgttttcccatctgccttctctgcag

SEQ ID NO: 927 - DNA, 255 bp, Homo sapiens
atgaagaaatggagcagcacagacttgggggcagctgcggacccactccaaaaggacacctgcccagaccccctggatggagaccctaactccaggccacctccagccaagccccagctctccacggccaagagccgcacccggctctttgggaagggtgactcggaggaggctttcccggtggattgccctcacgaggaaggtgagctggactcctgcccgaccatcacagtcagccctgttatcaccatccag

SEQ ID NO: 928 - DNA, 255 bp, Homo sapiens
atgcaccagcgtcacccccgggcaagatgccctcccctctgtgtggccggaatccttgcctgtggctttctcctgggctgctggggaccctcccatttccagcagagttgtcttcaggctttggagccacaggccgtgtcttcttacttgagccctggtgctcccttaaaaggccgccctccttcccctggcttccagaggcagaggcagaggcagaggcgggctgcaggcggcatcctacacctggagctgctg

SEQ ID NO: 929 - DNA, 255 bp, Homo sapiens
atggccgaggaggcagcccagaacatttctgatgaccaggaaaggtgtctccaggctgcctgctgcctttcctttggtggtgagctgtctgtgagcactgacaagagctggggtcttcatctgtgcagctgtagccctcctggaggtggattgtgggtcgaggtctatgctaatcatgtgcttcttatgagtgatgggaagtgtggctgtccttggtgtgctctgaatggaaaggcagaagaccgggaatcacag

SEQ ID NO: 930 - DNA, 426 bp, Homo sapiens
atgaaatctccccacgtgctggtgttcctttgcctcctggtggctctggtcaccgggaacctggttcagtttggggtgatgatcgagaagatgacaggcaagtccgccctgcagtacaacgactatggctgttactgcggcatcggtggctcccactggccggtggaccagactgactggtgctgccacgcccacgactgctgctacgggcgtctggagaagctgggctgtgagcccaaactggaaaagtatcttttctctgtcagcgaacgtggcattttctgcgccggcaggaccacctgccagcggctgacctgcgagtgtgacaagagggctgccctctgctttcgccgcaacctgggcacctacaaccgcaaatatgcccattatcccaacaagctgtgcaccgggcccaccccgccctgc

SEQ ID NO: 931 - DNA, 255 bp, Homo sapiens
atgggatggcggccgggaagaggcgctcctcacttcctagatgggatggcggccgggcagagacactcctcactttccagactgggcagccaggcagaggggctcctcacatcccagacggtgggcggccaggcagagacgctcctcacttcccagacggggcggcggccgggcagaggctgcaatctcggcactttgggaggccaaggcaggccgccgggagtgtcttgggacaaggtgcgcattcctggtgtg

SEQ ID NO: 932 - DNA, 255 bp, Homo sapiens
atgccgggcccgctagggctgctctgcttcctcgccctggggctgctcggctcggccgggcccagcggcgcggcgccgcctctctgcgcggcgccctgcagctgcgacggcgaccgtcgggtggactgctccgggaaggggctgacggccgtgcccgaggggctcagcgccttcacccaagcgctggatatcagtatgaacaacattactcagttgccagaagatgcatttaagaactttccttttctagaagag

SEQ ID NO: 933 - DNA, 255 bp, Homo sapiens
atggaggagctcttattactggccaaggaaagcagtcggagcaaccatacaatttggtttggacactttacaacatccactattctttctccatcaccaggaatccggtcaataatgagttcggctatagcttatttgtgtggacatctccatacacttggtggactgatgcctgttttgcacactcgtcacttccagggcactttggaacttgaggtgggagactggaaggataataggaggtaccggattttt

SEQ ID NO: 934 - DNA, 255 bp, Homo sapiens
atgacctcaccctccagctctccagttttcaggttggagacattagatggaggccaagaagatggctctgaggcggacagaggaaagctggattttgggagcgggctgcctcccatggagtcacagttccagggcgaggaccggaaattcgcccctcagataagagtcaacctcaactaccgaaagggaacaggtgccagtcagccggatccaaaccgatttgaccgagatcggctcttcaatgcggtctcccgg

SEQ ID NO: 935 - DNA, 255 bp, Homo sapiens
gcgtcctgcctctgcggctctgccccctgcatcctgtgcagctgctgccccgccagccgcaactccaccgtgagccgcctcatcttcacgttcttcctcttcctgggggtgctggtgtccatcattatgctgagcccgggcgtggagagtcagctctacaagctgccctgggtgtgtgaggagggggccgggatccccaccgtcctgcagggccacatcgactgtggctccctgcttggctaccgcgctgtctac

SEQ ID NO: 936 - DNA, 255 bp, Homo sapiens
tcccagaaatcctggatagaaagcactttgaccaagagggaatgtgtatatattataccaagttccaaggaccctcacagatgccttccaggatgtcaaatttgtcagcaactcgtcaggtgtttttgtggtcgcttggtcaagcaacatgcttgttttactgcaagtcttgccatgaaatactcagatgtgaaattgggtgaccattttaatcaggcaatagaagaatggtctgtggaaaagcatacagaacag

SEQ ID NO: 937 - DNA, 231 bp, Homo sapiens
atgctttattttctcaaaattccatatgtgactatgagcgtatggagaaatcgtttgatttttaaatttattgttttgtccttggtaggcaatctccttcaaatattattagcaaaatcaaacatagatcaaagtatgtatttgcatcttctgattgaaattaaacagtacttggtttcaaatgttttaaaaataacactttttaaactggagttgatattgaggatcatg

SEQ ID NO: 938 - DNA, 768 bp, Homo sapiens
atgccaggcccggccaccgacgcggggaagatccctttctgcgacgccaaggaagaaatccgtgccgggctcgaaagctctgagggcggcggcggcccggagaggccaggcgcgcgcgggcagcggcagaacatcgtctggaggaatgtcgtcctgatgagcttgctccacttgggggccgtgtactccctggtgctcatccccaaagccaagccactcactctgctctgggcctacttctgcttcctcctggccgctctgggtgtgacagctggtgcccatcgcttgtggagccacaggtcctaccgggccaagctgcctctgaggatatttctggctgtcgccaactccatggctttccagaatgacatcttcgagtggtccagggaccaccgagcccaccacaagtactcagagacggatgctgacccccacaatgcccgccggggcttcttcttctcccatattgggtggctgtttgttcgcaagcatcgagatgttattgagaaggggagaaagcttgacgtcactgacctgcttgctgatcctgtggtccggatccagagaaatacacagcacatccagaaagaaggaagagctctcaatcaagaggcagcgtgtgagatgcttcgtgaatggcatcaagggcatatattgaaagtcacccttcccggattacacattttagctttgttacatactcattgtaaccactccgaaaagtgctgcttgatgctgcgtgctctttctgtgtccctggaggtattc

SEQ ID NO: 939 - DNA, 255 bp, Homo sapiens
atgagtgttggacgtcgaagaataaagttgttgggtatcctgatgatggcaaatgtcttcatttattttattatggaagtctccaaaagcagtagccaagaaaaaaatggaaaaggggaagtaataatacccaaagagaagttctggaagatatctacccctcccgaggcatactggaaccgagagcaagagaagctgaaccggcagtacaaccccatcctgagcatgctgaccaaccagacgggggaggcgggc

SEQ ID NO: 940 - DNA, 255 bp, Homo sapiens
atggctgaggcgtcacggtggcaccgaggcggggcttcgaaacataagttgcattacagaaaggaagtagaaattacaaccacacttcaggaattgttactctactttatttttttaataaacctatgtatattgacttttgggatggtaaacccacatatgtattacttaaacaaggttatgtcatctctatttttggacacttctgtgcctggtgaagaaagaaccaactttaagtccattcgcagcataact

SEQ ID NO: 941 - DNA, 255 bp, Homo sapiens
atggcgtcctcttctactgtgcctctgggatttcactatgaaacaaagtatgttgttctcagctacttgggactcctctctcaagagaagctgcaagagcaacatctttcctcaccccaaggggttcaactagatatagcttcacaatctctggatcaagaaattttattaaaagttaaaactgaaattgaagaagagctaaaatctctggacaaagaaatttctgaagccttcaccagcacaggctttgaccgt

SEQ ID NO: 942 - DNA, 660 bp, Homo sapiens
atgtgttctgaaattattttgaggcaagaagttttgaaagatggtttccacagagaccttttaatcaaagtgaagtttggggaaagcattgaggacttgcacacctgccgtctcttaattaaacaggacattcctgcaggactttatgtggatccgtatgagttggcttcattacgagagagaaacataacagaggcagtgatggtttcagaaaattttgatatagaggcccctaactatttgtccaaggagtctgaagttctcatttatgccagacgagattcacagtgcattgactgttttcaagcctttttgcctgtgcactgccgctatcatcggccgcacagtgaagatggagaagcctcgattgtggtcaataacccagatttgttgatgttttgtgaccaagctggctccagaagaatgatcagattccggtttgattcctttgacaaaactatagagttcccgattttgaaatgctgggctcactcagaagtggcagccccttgtgctttggagaatgaggatatctgccaatggaacaagatgaagtataaatcagtatataagaatgtgattctacaagttccagtgggactgactgtacatacctctctagtatgttctgtgactctgctcattacaatcctgtgctct

SEQ ID NO: 943 - DNA, 255 bp, Homo sapiens
atggaaggctttgggggtgtcggaggcagagggacccgggggtttgcagcgaagggtgtctggagagggagagctgaggaggggccggttctgggggctgcagaacggggatttatggtgtcgactgggagcaggaggagggtcttcgaggggcctgggggcgggggactaagatggacgcctgggaagggaactgggaggcagcggggtgcctgggggccgagggctgaggacggggtgcggaggcgcactctg

SEQ ID NO: 944 - DNA, 537 bp, Homo sapiens
ggtcatgcttcaccccttcctccatctgctgcacctaccactgattctacagattccataacaggacagaattcaagacagagagaagaagagctggaattaatagaccaactgcgtaaacatattgagtaccggttgaaagtgtctctaccttgtgatctcggagcagctctaactgacggtgttgttctttgccatttggccaatcatgtgcgacctcgatctgtcccaagcattcatgttccctcaccagctgtacctaaattaacaatggcgaaatgcaggcgaaatgtggaaaatttcctagaagcttgcagaaaaattggtgtacctcaggacaatctttgttccccttccgacatccttcagctaaacctcagcgttaaaagaactgttgaaacgctcctttctcttggggcacactcagaagaatccagttttgtctgtctctctctgcagcttctgggttttgtggcattttactgtactgtgatgttaactctctgtgtgctttattactggctcttccccgctcgc

SEQ ID NO: 945 - DNA, 843 bp, Homo sapiens
atgccggtgcagctgacgacagccctgcgtgtggtgggcaccagcctgtttgccctggcagtgctgggtggcatcctggcagcctatgtgacgggctaccagttcatccacacggaaaagcactacctgtccttcggcctgtacggcgccatcctgggcctgcacctgctcattcagagcctttttgccttcctggagcaccggcgcatgcgacgtgccggccaggccctgaagctgccctccccgcggcggggctcggtggcactgtgcattgccgcataccaggaggaccctgactacttgcgcaagtgcctgcgctcggcccagcgcatctccttccctgacctcaaggtggtcatggtggtggatggcaaccgccaggaggacgcctacatgctggacatcttccacgaggtgctgggcggcaccgagcaggccggcttctttgtgtggcgcagcaacttccatgaggcaggcgagggtgagacggaggccagcctgcaggagggcatggaccgtgtgcgggatgtggtgcgggccagcaccttctcgtgcatcatgcagaagtggggaggcaagcgcgaggtcatgtacacggccttcaaggccctcggcgattcggtggactacatccaggtgtgcgactctgacactgtgctggatccagcctgcaccatcgagatgcttcgagtcctggaggaggatccccaagtagggggagtcgggggagatgtccagcccccagggaaaggtatggcagtagaggatgaccaggtccaagctgcccaggtcagagctacggaagcatggtccgttcaccaacgccacgtttctagagagcag

SEQ ID NO: 946 - DNA, 255 bp, Homo sapiens
gagatgaacatctgcaacaagccctccaacaagacggcccctgagaagagtgtgtggacggcaccggcacagcccagcggaccctcccctgagctgcagggccagcgatcccgccggaatgggtggagctggccccctcacccgctccagattgtggcctggctgctgtacctcttctttgctgtgatcggctttgggatccttgttcccctcctgcctcaccactgggtgcccgctggctacgcttgcatgggc

SEQ ID NO: 947 - DNA, 891 bp, Homo sapiens
atggaagagccaacagcagtagaaggccaggtccagcttccaagcccccaccagggctctctcaggaaggctgtggctgctgccctggcgctggatggggaatccacaatggggcacaggaaaaagaagaggaaagagtcacgcccagaatccatcatcatctaccgctcagacaatgagaaaacagatgaggagcccggagaatcagaaggtggagatcagcctaaagaggaggagggagatgatttcctagactatcctgtggatgatgatatgtggaacctgcctctggacagccgctacgtcaccttaactgggaccatcacacgagggaagaaaaagggtcagatggtggacatccatgtcacattgacagagaaagagctgcaggaactgaccaaacctaaagagtcatcaagggaaacgacgcctgaaggaagaatggcctgccagatgggagctgaccgtgggccccatgtggtcctctggacgctgatctgcctgcctgtggttttcatcctttcttttgttgtctctttctactacggcactatcacctggtacaacatcttcctcgtgtataatgaggaaaggaccttctggcacaagatctcgtattgcccttgcctcgttctcttctatccagtgctcatcatggccatggcttcttccctcggcctctacgctgctgtggtccagctctcgtggtcctgggaagcatggtggcaagctgcccgggacatggagaaaggcttctgtggctggctctgcagcaagctgggtctggaggactgttctccctacagcattgtggagttgcttgaatccgacaatatctcaagcactctctccaacaaggaccccatccaagaagtagaaacctccacggtc

SEQ ID NO: 948 - DNA, 453 bp, Homo sapiens
atggcgttcaccttcgccgcgttctgctacatgctcaccctggtgctgtgcgcctccctcatcttctttgtcatctggcacatcatagcctttgatgagctgcggaccgacttcaagaaccccatcgaccaggggaaccctgcgcgggcacgcgagcgtttaaaaaacatcgaacgcatctgctgcctcctgaggaagctggtggtcccagaatactccatccacggcctcttctgtctgatgtttctgtgtgcagcagagtgggtgaccctgggcctcaacatccccctcctcttctaccacctctggaggtacttccaccgtcctgcagatggctctgaggtcatgtatgatgcggtctccatcatgaatgctgacattctcaactactgccagaaggagtcctggtgcaaacttgccttctacctgctctccttcttctattacctgtac

SEQ ID NO: 949 - DNA, 255 bp, Homo sapiens
atgagcgtgtacaacgctgtgggtgagggccctagccccccgcaggaggtctttgttggggaggcagtgcccacagcagcacctcgtaacgtggtcgtccacggcacggccacacagctggacgtgacttgggagccacctccgctggacagccagaatggagacatccaggggtacaagatttatttctgggaagcccaggggaacctcacagagcgagtgaagacgcttttcctggctgagaacagcgtgaag

SEQ ID NO: 950 - DNA, 255 bp, Homo sapiens
gcgcgagcgaaaacaaacagctggggctgcgagcgcccccgccccggccccgagagcacgccggcccagtcccccacctggggcgcccgtctgcccaccatgaggaagatccgcgccaatgccatcgccatcctgaccgtagcctggatcctgggcactttctactacttatggcaggacaaccgagcccacgcagcatcctccggcggccggggcgcgcagagggcaggcaggaggtcggagcagctccgcgag

SEQ ID NO: 951 - DNA, 336 bp, Homo sapiens
atgaccaggtgtgctctgctgttgctgatggtcctgatgttgggcagagtcctggttgtcccagtgacccctatcccaaccttccagctccgccctcagaattctccccagaccactccccgacctgcggcctcagagagcccctcagctgctcccacatggccgtgggctgcccagagccactgcagccccacccgccaccctggctcgcgcattgtcctatcgctggatgtccccatcggcctcttgcagatcttactggagcaagcccgggccagggctgccagggagcaggccaccaccaacgcccgcatcctggcccgtgtcggccactgc

SEQ ID NO: 952 - DNA, 522 bp, Homo sapiens
atggggcagagcctgaccccgtggggatctgcctgcctggcctgctcctgccgcggccggacgctgctgtgggctgctcctggcgtcactctcgccttgcttggcctctctctcgttcacagcctcctgctcttcatggatgaagcggacgccttccttcggaagcgagccactgaggagataagcaaggacctcagagccacactgaacgccttcctgtaccacatgggccaacacagcaacaaattcatgctggtcctggccagcaatctgcctgagcagttcgactgtgccatcaacagccgcatcgacgtgatggtccacttcgacctgccgcagcaggaggagcgggagcgcctggtgagactgcattttgacaactgtgttcttaagccggccacagaaggaaaacggcgcctgaagctggcccagtttgactacgggaggaagtgctcggaggtcgctcggctgacggagggcatgtcgggccgggagatcgctcagctggccgtgtcctggcag

SEQ ID NO: 953 - DNA, 255 bp, Homo sapiens
atgggcgagcaccccagcccgggccccgcggtggccgcctgcgccgaggcggagcgcatcgaggagctggaacccgaggccgaggagcggctgcccgcggcgccggaggaccactggaaagtcctgtttgatcagtttgaccctgggaacacaggctacattagcacaggcaagttccggagtcttctggagagccacagctccaagctggacccgcacaaaagggaggtcctcctggctcttgccgacagccac

SEQ ID NO: 954 - DNA, 255 bp, Homo sapiens
atgaagctggccctgctcctgccctgggcgtgttgctgcctctgcgggtcggcgctggccaccggcttcctctatcccttctcggccgcagctctgcagcagcacggctaccccgagcccggcgccggctcccctggcagcggctacgcgagccgccggcactggtgccatcacacagtgacacggacggtgtcctgccaggtgcagaatggctcggagacggtggtccagcgcgtgtaccagagctgccggtgg

SEQ ID NO: 955 - DNA, 807 bp, Homo sapiens
atgtaccggaacccggggccctcggggccccagctccgggacttcagcagcatcatccagacgtgcagcggcaacatccagcggatcagccaagccactgctcagataaagaatttgatgagccagctaggaactaagcaggactcaagcaagctacaggaaaatctgcaacagttacaacactccacaaatcagctcgccaaggaaacaaatgaattgctgaaagaattagggtccttgccccttcccttatctacttcagaacagcgccagcagagacttcagaaggaacgcctcatgaatgacttctctgcagccttaaacaatttccaggctgtgcagagaagggtatctgaaaaggaaaaggagagtattgccagagcaagagctggatctcgtctttctgcagaagagaggcaaagagaggagcagctggtctcatttgacagccatgaggagtggaaccagatgcagagccaggaggatgaggtggccatcactgagcaggatttggaacttattaaagaaagagaaacggcaattcggcagctggaggctgacattttggatgtcaatcagatatttaaagatttggccatgatgatccatgaccagggtgatctgattgatagcatagaagccaatgtggaaagctcagaggtgcacgtcgaaagagccactgaacagttacagcgagctgcttactatcagaaaaaatctcgcaagaagatgtgtatcctggtgcttgtcctgtcagtgattattctaatcttgggacttattatctggctagtttataaaacgaag

SEQ ID NO: 956 - DNA, 255 bp, Homo sapiens
atgggcgagcggcgcaggaagcagccggagccggacgcggcgagcgcggccggggagtgcagcctcctggctgccgccgaatcgagcaccagcctgcagagcgcgggcgcgggcggcggcggcgtcggggacctggagcgcgcggcgcggcggcagttccagcaggacgagacccccgccttcgtgtacgtggtggccgtcttctccgcgctgggcggcttcctgtttggctatgacaccggggtggtgtcaggg

SEQ ID NO: 957 - DNA, 255 bp, Homo sapiens
ttgaggaacagcaccttcaaaaacatgcagcgccggcacacaacgctgagggagaagggccgtcgccaggccatccggggtcccgcctacatgttcaacgagaagggcaccagtctgacgcccgaggaggagcgcttcctggactcggctgagtatggcaacatcccggtggtccggaaaatgctggaggagtccaagacccttaacttcaactgtgtggactacatggggcagaacgctctgcagctggccgtg

SEQ ID NO: 958 - DNA, 255 bp, Homo sapiens
atgctccaaggccacagctctgtgttccaggccttgctggggaccttcttcacctgggggatgacagcagctggggcagctctcgtgttcgtattctctagtggacagaggcggatcttagatggaagtcttggctttgctgcaggggtcatgttggcagcttcctattggtctcttctggccccagcagttgagatggccacgtcctctgggggcttcggtgcctttgccttcttccctgtggctgttggcttc

SEQ ID NO: 959 - DNA, 255 bp, Homo sapiens
ctggagtcgctgaagcgctggaacgaagagcggggcctctggtgcgagaagggggtgcaggtgctgctgacgacggtgggcgccttcgccgccttcggcctcatgaccatcgccatcagcactgactactggctctacacgcgcgccctcatctgcaacaccaccaacctcacggccggcggcgacgacgggaccccccaccgcgggggcggcggcgcctcggagaagaaggaccccggcggcctcacgcactcg

SEQ ID NO: 960 - DNA, 255 bp, Homo sapiens
atggcccctgcgaggacgatggcccgcgcccgcctcgccccggccggcatccctgccgtcgccttgtggcttctgtgcacgctcggcctccagggcacccaggccgggccaccgcccgcgccccctgggctgcccgcgggagccgactgcctgaacagctttaccgccggggtgcctggcttcgtgctggacaccaacgcctcggtcagcaacggagctaccttcctggagtcccccaccgtgcgccggggctgg

SEQ ID NO: 961 - DNA, 255 bp, Homo sapiens
atggctacaacagtccctgatggttgccgcaatggcctgaaatccaagtactacagactttgtgataaggctgaagcttggggcatcgtcctagaaacggtggccacagccggggttgtgacctcggtggccttcatgctcactctcccgatcctcgtctgcaaggtgcaggactccaacaggcgaaaaatgctgcctactcagtttctcttcctcctgggtgtgttgggcatctttggcctcaccttcgccttc

SEQ ID NO: 962 - DNA, 255 bp, Homo sapiens
atgagtaatgtctcagggatcctggagacagccggcgtccccctggtgtcagcgaactggccgcagcccagccccccaccggctgtgccagctgggccgcagatggaccacatggggaacagctcccagggggccccctggctcttcctcacctccgcactggcccgaggcgtctcggggatcttcgtgtggactgccctggtgctcacctgccaccagatctatctgcacctgcgctcctacaccgtgccacag

SEQ ID NO: 963 - DNA, 297 bp, Homo sapiens
atgctgagtctggaggagacggaggcaggagaggagggaagcaggataacgttgcctggtggaggcggatgcagaaggggggacttcccctgggatgacgaggatttccgcagtctggcccttttgggggcaggcgttgccatgggatttttctacctctattttcgagatcctggaagagaaatcacgtggaagcactttgtacagtattacctggccagaggtctggtggaccggctggaagtcgtgaacaaacaatctgtgcgtgttattcctgcccctgggacctcttctgaa

SEQ ID NO: 964 - DNA, 255 bp, Homo sapiens
atggcggcggaaacgctgctgtccagtttgttaggactgctgcttctgggactcctgttacccgcaagtctgaccggcggtgtcgggagcctgaacctggaggagctgagtgagatgcgttatgggatcgagatcctgccgttgcctgtcatgggagggcagagccaatcttcggacgtggtgattgtctcctctaagtacaaacagcgctatgagtgtcgcctgccagctggagctattcacttccagcgtgaa

SEQ ID NO: 965 - DNA, 255 bp, Homo sapiens
atattttccaatttgtcactggatgagcgttgcctttccgcatcattggtttgcaagtactggcgtgacctttgtttagacttccagttttggaagcagctggatcttagtagtcgtcagcaggtcactgatgaattgttggaaaaaattgcatcaagaagtcagaatataattgaaatcaacatttctgattgtcgcagtatgtctgataatggcgtatgtgttttagcatttaaatgtcctggacttcttagg

SEQ ID NO: 966 - DNA, 255 bp, Homo sapiens
atgaccgcggccgccgcctccaactgggggctgatcacgaacatcgtgaacagcatcgtaggggtcagtgtcctcaccatgcccttctgcttcaaacagtgcggcatcgtcctgggggcgctgctcttggtcttctgctcatggatgacgcaccagtcgtgcatgttcgtgaagtcggccagcctgagcaagcggaggacctacgccggcctggcattccacgcctacgggaaggcaggcaagatgctggtggag

SEQ ID NO: 967 - DNA, 660 bp, Homo sapiens
gccacctgcgtgtattttgtgctctggctgccctcatctagcccatcgtgggtcagcaccctcatcaagtgcctgcctatcttctgcctctggctcttccttctggcccatggcctgggattcctgctggcccaccccagcgccacccgcatctttgtggggcttgtcttctctgctgtaggtgacgccttcctcatctggcaggaccaaggatacttcgtgcatggtctgctgatgtttgctgtgacccacatgttctacgcctcggcctttggcatgcagccactggctcttcggacaggtctggtgatggcagcgctgtcgggcctgtgctatgccctcctctacccatgcctctcaggtgccttcacctacctggtgggggtctatgtggcccttatcggcttcatgggctggcgagctatggcagggctgcggctggccggggcagactggcgctggacagagctggcagctggcagtggtgcactcttctttatcatctcagacctgaccatcgccctcaacaaattctgttttcctgtgccctactctcgggcgcttatcatgtccacctactatgtggcccagatgctcgtcgccttgtcagctgtcgaaagccgggagcctgtggaacactacagactgaccaaggccaac

SEQ ID NO: 968 - DNA, 678 bp, Homo sapiens
atggaccaggcgctgtccctgtggttcctcctgggctggattggcggagactcctgcaacctcatcggctccttccttgctgaccagctgcccctgcagacctacacggctgtgtattatgtcttggcagacctggtgatgctgacgctgtacttttactacaagttcaggacgcgcccctctctgttgtctgcccccatcaactccgtgctgttgttcctcatggggatggcgtgcgccacaccgctgctgagtgctgctgggcccgtggctgcccctagggaagccttccgggggcgggcgctcctgtccgtggagtcgggcagcaagcccttcacccggcaggaagtcattggcttcgtcatcggctccatctccagcgtgttgtacctgctttcccggctgcctcagatccgcaccaacttcctccggaagtccacccaggggatctcctactctctgttcgcgctggtgatgctggggaacacgctgtatgggctgagcgtgctgctcaaaaaccccgaggagggccagagcgagggcagctacctgctgcaccacctgccctggcttgtgggcagcctgggcgtgctgctgctcgacaccatcatctccatccagttcctggtgtacaggcgcagcaccgccgcctcggagcttgagcccctcctccccagc

SEQ ID NO: 969 - DNA, 342 bp, Homo sapiens
atgcgttgctgggttattttaatcattctaggcatcgttttcctccttatgcctctatcattcctccctatctacactaacatcccacgctctgaacgcgcgcccattaatacccttctttcctccactctccctgggactcttgatcaaagcgcggccctttccccagccttagcgaggcgccctgcagcctggtacgcgcgtggcgtggcggtgggcgcgcagtgcgttctcggtgtggagggcagctgttccgcctgcgatgatttatactcacaggacaaggatgcggtttgtcaaacagtactgctacggaggagcagcagagaaagggagagggtt

SEQ ID NO: 970 - DNA, 255 bp, Homo sapiens
atgaaaaaaggtatccgttatgaaacttccagaaaaacgagctacatttttcagcagccgcagcacggtccttggcaaacaaggatgagaaaaatatccaaccacgggagcctgcgggtggcgaaggtggcataccccctggggctgtgtgtgggcgtgttcatctatgttgcctacatcaagtggcaccgggccaccgccacccaggccttcttcagcatcaccagggcagccccgggggcccggtggggtcag

SEQ ID NO: 971 - DNA, 255 bp, Homo sapiens
gaacccctggccccagagcccccagcacggccctctaaggtggagcagctccaagatgagaccaaccacctaaggaaggagctggagagtgtgggaagacagctccaggctgaggtggaaaacaatcagatgttgagtctcctgaacaggagacaggaggagaggctgcaggaacaggaggggtggcaggaggaacaggagaggctgctggacaagaataatgagaacaagagtgcactgcagttggagcagcaa

SEQ ID NO: 972 - DNA, 255 bp, Homo sapiens
atggccgacagtggacttagggaacctcaagaggactctcaaaaggatttggaaaatgatccatcagtaaattctcaggcgcaggagaccacaatcatagcaagtaatgctgaagaagctgagatcctacactctgcctgtggtcttagcaaagaccaccaagaggtagagacagaaggtccagaaagtgcagatacaggtgataaatcagaaagtccagatgaagcaaatgtggggaaacatccaaaggataaa

SEQ ID NO: 973 - DNA, 492 bp, Homo sapiens
ggcgcgcgcggggcccgcacgtggaggccggcgcgggggcgcgggcagggccggctgctgagacgcgctgctgccccccgcgcgggcgccgcggcttcaatggcgccatcgcccaggaccggcagccggcaagatgcgaccgccctgcccagcatgtcctcaactttctgggcgttcatgatcctggccagcctgctcatcgcctactgcagtcagctggccgccggcacctgtgagattgtgaccttggaccgggacagcagccagcctcggaggacgatcgcccggcagaccgcccgctgtgcgtgtagaaaggggcagatcgccggcaccacgagagcccggcccgcctgtgtggacgcaagaatcatcaagaccaagcagtggtgtgacatgcttccgtgtctggagggggaaggctgcgacttgttaatcaaccggtcaggctggacgtgcacgcagcccggcgggaggataaagaccaccacggta

SEQ ID NO: 974 - DNA, 255 bp, Homo sapiens
atgtgtgaaacaagcgccttctatgtgcctggggtcgcgcctatcaacttccaccagaacgatcccgtagaaatcaaggctgtgaagctcaccagctctcgaacccagctaccttatgaatactattcactgcccttctgccagcccagcaagataacctacaaggcagagaatctgggagaggtgctgagaggggaccggattgtcaacacccctttccaggttctcatgaacagcgagaagaagtgtgaagtt

SEQ ID NO: 975 - DNA, 255 bp, Homo sapiens
ggagatgacaagtatgggcggaagatcattgtgtttagtgcctgtcgaatgccccccagccaccagctcgaccacagcaagctcctggggtacctgaagcacaccctggaccagtacgtggagagtgactacacacttctgtatctgcaccacggcctgaccagcgacaacaagccctccctcagctggctccgtgatgcctaccgggagtttgaccgcaagtacaagaaaaacatcaaggccttgtacatcgtg

SEQ ID NO: 976 - DNA, 255 bp, Homo sapiens
tacaggataccctccctgttcaaaactacaagaccaaagaaggttgggatttccattctcaattcattctctattgtttggagcacagtctgcagcatcttctttatgtctaccttgactgttacaaatcccaaactgatcttccaggctagccttgcaaatgctcagattttgattcccaccaatcaggccagtgtaagcagtatgctattggaaggacataccctcctggcccttgctactacaatgtattct

SEQ ID NO: 977 - DNA, 255 bp, Homo sapiens
ttttcagaaattgaaaagggagggtgtggggatcctggaatccccgcctatgggaagcggacgggcagcagtttcctccatggagatacactcacctttgaatgcccggcggcctttgagctgggggagagagttatcacctgtcagcagaacaatcagtggtctggcaacaagcccagctgtgtattttcatgtttcttcaactttacggcatcatctgggattattctgtcaccaaattatccagaggaatat

SEQ ID NO: 978 - DNA, 255 bp, Homo sapiens
atggcggatacagcgactacagcatcggcggcggcggctagtgccgctagcgcctcgagcgatgcacctcctttccaactgggcaaaccccgcttccagcagacgtccttctatggccgcttcaggcacttcttggatatcatcgaccctcgcacactctttgtcactgagagacgtctcagagaggctgtgcagctgctggaggactataagcatgggaccctgcgcccgggggtcaccaatgaacagctctgg

SEQ ID NO: 979 - DNA, 255 bp, Homo sapiens
atggcaggtcctaatcaactctgcattcgccgctggactaccaagcatgtagctgtgtggctgaaggatgaaggcttttttgaatatgtggacattttatgcaataagcaccgacttgatggaatcacattgctaacattgactgaatatgatctccggtctcctcctctggaaatcaaagtcttaggggacattaaaaggttaatgctctcagtccgaaaattgcagaaaatacatattgatgttttagaagag

SEQ ID NO: 980 - DNA, 561 bp, Homo sapiens
atggcgccgcggccgctgggccccttggtgctggcgctgggcggcgccgcggcggtgctgggctcggtgctcttcatcctctggaagacctacttcggccgcggccgagagcggcgctgggaccggggagaggcctggtggggcgcggaggctgcccgcctccccgagtgggacgagtgggaccccgaggacgaggaggacgaggagccggcgctggaggagctggaacagcgcgaggtgctggtgctggggctggatggcgcaggcaagagcacgttcctgcgcgtgttgtcggggaagccaccgctggaaggccacatccccacctggggcttcaactccgtgcgtctgcccaccaaggactttgaggtggacctgctagaaattgggggcagccagaacctgcgcttctactggaaggagtttgtgagcgaggtggatgtgctggtgtttgtggtggactcggctgaccgactgcggctgccctgggcccgacaggagctgcacaagctgctggacaaggaccctgacctgcctgtcgtcgtggtggccaacaagcag

SEQ ID NO: 981 - DNA, 795 bp, Homo sapiens
atgtctgaagaagttacttatgcagatcttcaattccagaactccagtgagatggaaaaaatcccagaaattggcaaatttggggaaaaagcacctccagctccctctcatgtatggcgtccagcagccttgtttctgactcttctgtgccttctgttgctcattggattgggagtcttggcaagcatgtttcacgtaactttgaagatagaaatgaaaaaaatgaacaaactacaaaacatcagtgaagagctccagagaaatatttctctacaactgatgagtaacatgaatatctccaacaagatcaggaacctctccaccacactgcaaacaatagccaccaaattatgtcgtgagctatatagcaaagaacaagagcacaaatgtaagccttgtccaaggagatggatttggcataaggacagctgttatttcctaagtgatgatgtccaaacatggcaggagagtaaaatggcctgtgctgctcagaatgccagcctgttgaagataaacaacaaaaatgcattggaatttataaaatcccagagtagatcatatgactattggctgggattatctcctgaagaagattccactcgtggtatgagagtggataatataatcaactcctctgcctgggttataagaaacgcacctgacttaaataacatgtattgtggatatataaatagactatatgttcaatattatcactgcacttataaaaaaagaatgatatgtgagaagatggccaatccagtgcagcttggttctacatattttagggaggca

SEQ ID NO: 982 - DNA, 255 bp, Homo sapiens
atgagccgcagcccgcagcgagctctgcccccgggcgcgctccctcggctgctccaggctgcgcctgcagccgcgccgcgtgccctgctcccgcagtggccccggcgcccaggacgccgctggcccgcgtcccctctcggaatgaaggtgttccgtaggaaggcgctggtgttgtgcgcgggctatgcactgctgctggtgctcactatgctcaacctcctggactacaagtggcacaaggagccgctgcagcag

SEQ ID NO: 983 - DNA, 636 bp, Homo sapiens
atgattggatacactctcaaatatgtggcctttaacgggaccaaagtaggaaagcagatagtggaaaacttctctcccaatcagaccaagttcacggtgcaaagaacggaccccgtgtcacgctaccgctttaccctcagcgccaggacgcaggtgggctctggggaagccgtcacagaggagtcaccagcacccccgaatgaagcttacaccaacaaccaagcggacatcgccacccagggctggttcattgggcttatgtgcgccatcgccctcctggtgctgatcctgctcatcgtctgtttcatcaagaggagtcgcggcggcaagtacccagtacgagaaaagaaggatgttccccttggccctgaagaccccaaggaagaggatggctcatttgactatagtgatgaggacaacaagcccctgcagggcagtcagacatctctggacggcaccatcaagcagcaggagagtgacgacagcctggtggactatggcgagggtggcgagggtcagttcaatgaagacggctccttcatcggccagtacacggtcaaaaaggacaaggaggaaacagagggcaacgaaagctcagaggccacgtcacctgtcaatgctatctactctctggcc

SEQ ID NO: 984 - DNA, 90 bp, Homo sapiens
atgccaccgcattcggggcagagccggggccggaagccagggagctgcctgctgctgctgctgctgctgctgctgctgctgctgctgctg

SEQ ID NO: 985 - DNA, 255 bp, Homo sapiens
atggacgtgaaggagaggaagccttaccgctcgctgacccggcgccgcgacgccgagcgccgctacaccagctcgtccgcggacagcgaggagggcaaagccccgcagaaatcgtacagctccagcgagaccctgaaggcctacgaccaggacgcccgcctagcctatggcagccgcgtcaaggacattgtgccgcaggaggccgaggaattctgccgcacaggtgccaacttcaccctgcgggagctggggctg

SEQ ID NO: 986 - DNA, 255 bp, Homo sapiens
atggagcgatctccaggagagggccccagccccagccccatggaccagccctctgctccctccgaccccactgaccagccccccgctgctcacgcaaagccagacccaggttctgggggccaacctgctggccctggcgcggcgggtgaggccctggcggtgctgacttcattcgggaggcggttgctggtgctgatacctgtgtatttggccggggcagtgggactcagcgtgggtttcgtgctcttcggcctc

SEQ ID NO: 987 - DNA, 255 bp, Homo sapiens
atgcctaagggaggagctcccccatggatcatggcgttaatgtttacaggacatttactattcttagcattattgatgtttgctttctctacttttgaggaatctgtgagcaattattccgaatgggcagttttcacagatgatatagatcagtttaaaacacagaaagtgcaagatttcagacccaaccaaaagctgaagaaaagtatgcttcatccaagtttatattttgatgctggagaaatccaagcaatg

SEQ ID NO: 988 - DNA, 255 bp, Homo sapiens
ctcctagagctcattccctacgccccgactctgtcctggacagcgtgcccaccagccatggcggggccccggggcctcctcccactctgcctcctggccttctgcctggcaggcttcagcttcgtcagggggcaggtgctgttcaaaggctgtgatgtgaaaaccacgtttgtcactcatgtaccctgcacctcgtgcgcggccatcaagaagcagacgtgtccctcaggctggctgcgggagctcccggatcag

SEQ ID NO: 989 - DNA, 255 bp, Homo sapiens
atgcgggctcccggccgcccggccctgcggccgctgccgctgccgccgctgctgctgttgctcctggcggcgccttggggacgggcagttccctgtgtctctggtggtttgcctaaacctgcaaacatcaccttcttatccatcaacatgaagaatgtcctacaatggactccaccagagggtcttcaaggagttaaagttacttacactgtgcagtatttcatatatgggcaaaagaaatggctgaataaatca

SEQ ID NO: 990 - DNA, 255 bp, Homo sapiens
atggctctcctctttctcctaccccttgtcatgcagggtgtgagcagggctgagatgggcaccgcggatctggggccgtcctcagtgcctacaccaactaatgttacaattgaatcctataacatgaaccctatcgtatattgggagtaccagatcatgccacaggtccctgtttttaccgtagaggtaaagaactatggtgttaagaattcagaatggattgatgcctgcatcaatatttctcatcattattgt

SEQ ID NO: 991 - DNA, 255 bp, Homo sapiens
cccccccccgcctcccgccgcctccgggctcccggctcccggccgcgcctcgccccatgcactcgccgcgccgcgcagcccgcgcacgcccggatggctcctcgcgccgcgggcggcgcaccccttagcgcccgggccgccgccgccagccccccgccgttccagacgccgccgcggtgcccggtgccgctgctgttgctgctgctcctgggggcggcgcgggccggcgccctggagatccagcgtcggttcccc

SEQ ID NO: 992 - DNA, 255 bp, Homo sapiens
atgggcatgacacggatgctcctggaatgcagtctcagtgacaagttgtgtgtcatccaggagaagcagtatgaagtgattatcgtcccaactttgttggttactatcttcctcatccttcttggggtcatcctgtggctttttatcagagaacaaagaactcaacagcagcgttctggacctcaaggcattgcccctgttcctccacctagggacctaagctgggaagcaggacatggaggaaatgtggctttg

SEQ ID NO: 993 - DNA, 255 bp, Homo sapiens
atggcttgggcaagtaggctgggcctgctgctggcactgctgctgcccgtggtcggtgcctccacgccaggcaccgtggtccgactcaacaaggcagcattgagctacgtgtctgaaattgggaaagcccctctccagcgggccctgcaggtcactgtccctcatttcctggactggagtggagaggcgcttcagcccaccaggatccggattctgaatgtccatgtgccccgcctccacctgaaattcattgct

SEQ ID NO: 994 - DNA, 411 bp, Homo sapiens
atgcaaccttgggcgctgccaaccgtgggcgagctctgggtgtgcgggcggcctggcgcggcgctccgatggagtctagttctgtcgcccaggctggagcccagtggtgtgatctcagctcactgcaatctccacctcctggcttcaagcgattcttctgcttcagcctcccgactgtgtcagcgtgttatgatgccgtcccgtaccaacctggctactggaatccccagtagtaaagtgaaatattcaaggctctccagcacagacgatggctacattgaccttcagtttaagaaaacccctcctaagatcccttataaggccatcgcacttgccactgtgctgtttttgattggcgcctttctcattattataggctccctcctgctgtcaggctacatcagcaaaggg

SEQ ID NO: 995 - DNA, 255 bp, Homo sapiens
atgggaaggaagagtaagaagtggggcaagaaggtgtcgcggtacgaggggaaggtgagactcaagaaggtgccggctaagaagctggtgccggcgtggaaggagaaggtgctgtgggccctgctggcagtgctcctggcgtcgtggaggctgtgggcgatcaaggatttccaggaatgcacctggcaggttgtcctgaacgagtttaagagggtaggcgagagtggtgtgagcgacagcttctttgagcaagag

SEQ ID NO: 996 - DNA, 255 bp, Homo sapiens
atggctgcggtgtttctggtaacgctttatgaatactcgccgcttttctacatcgcggtggtctttacctgcttcatcgtgaccaccggcctggtattgggatggtttggttgggatgttccagtaattctgagaaattcagaagagacccagttcagcacaagagttttcaaaaagcaaatgagacaagtcaagaatccttttggcttagagatcactaatccatcttcagcttcaattacaactggcataacc

SEQ ID NO: 997 - DNA, 255 bp, Homo sapiens
atgaaggagtcatctttgcaaaatagctcctgcagcctgggaaaggagactaaaaaggaaaacatgttccttcagtcgtcaatgctgacctgcattttcctgctaatatctggttcctgtgagttatgcgccgaagaaaatttttctagaagctatccttgtgatgagaaaaagcaaaatgactcagttattgcagagtgcagcaatcgtcgactacaggaagttccccaaacggtgggcaaatatgtgacagaa

SEQ ID NO: 998 - DNA, 762 bp, Homo sapiens
atggacaactacgcagatctttcggataccgagctgaccaccttgctgcgccggtacaacatcccgcacgggcctgtagtaggatcaactcgtaggctttacgagaagaagatcttcgagtacgagacccagaggcggcggctctcgccccccagctcgtccgccgcctcctcttatagcttctctgacttgaattcgactagaggggatgcagatatgtatgatcttcccaagaaagaggacgctttactctaccagagcaagggctacaatgacgactactatgaagagagctacttcaccaccaggacttatggggagcccgagtctgccggcccgtccagggctgtccgccagtcagtgacttcattcccagatgctgacgctttccatcaccaggtgcatgatgacgatcttttgtcttcttctgaagaggagtgcaaggatagggaacgccccatgtacggccgggacagtgcctaccagagcatcacgcactaccgccctgtttcagcctccaggagctccctggacctgtcctattatcctacttcctcctccacctcttttatgtcctcctcatcatcttcctcttcatggctcacccgccgtgccatccggcctgaaaaccgtgctcctggggctgggctgggccaggatcgccaggtcccgctctggggccagctgctgcttttcctggtctttgtgatcgtcctcttcttcatttaccacttcatgcaggctgaagaaggcaaccccttc

SEQ ID NO: 999 - DNA, 255 bp, Homo sapiens
gttctctgctgctactgtaaaaacgaaatgagtggtcctgctcaggttccaatgatgtccccaaatggttctgtgcctcctatctatgtgcctcctggatatgccccacaggttattgaagacaatggtgttcgaagagttgtcgtggtccctcaggcaccagagtttcaccctggtagtcacacagttctccaccgttctccacatcctcctctacctggtttcattcctgtcccaactatgatgccgcctcca

SEQ ID NO: 1000 - DNA, 255 bp, Homo sapiens
atgacccccatcctcacggtcctgatctgtctcgggctgagtctgggccccaggacccacgtgcaggcagggcacctccccaagcccaccctctgggctgaaccaggctctgtgatcacccaggggagtcctgtgaccctcaggtgtcaggggggccaggagacccaggagtaccgtctatatagagaaaagaaaacagcactctggattacacggatcccacaggagcttgtgaagaagggccagttccccatc

SEQ ID NO: 1001 - DNA, 255 bp, Homo sapiens
atgctgcccctgctgctgctgcccctgctgtggggggggtccctgcaggagaagccagtgtacgagctgcaagtgcagaagtcggtgacggtgcaggagggcctgtgcgtccttgtgccctgctccttctcttacccctggagatcctggtattcctctcccccactctacgtctactggttccgggacggggagatcccatactacgctgaggttgtggccacaaacaacccagacagaagagtgaagccagag

SEQ ID NO: 1002 - DNA, 255 bp, Homo sapiens
atgtgggtgaccaaactcctgccagccctgctgctgcagcatgtcctcctgcatctcctcctgctccccatcgccatcccctatgcagagggacaaaggaaaagaagaaatacaattcatgaattcaaaaaatcagcaaagactaccctaatcaaaatagatccagcactgaagataaaaaccaaaaaagtgaatactgcagaccaatgtgctaatagatgtactaggaataaaggacttccattcacttgcaag

SEQ ID NO: 1003 - DNA, 255 bp, Homo sapiens
atgagtttccacaaggaggacggagtgaacagtctgtgccagaaggctctgcacatcgtcaccgagctgtgcttcgccggccaggtggagtgggagaagtgctcgggcatcttccctcgggacaggggcagccagggcggaagcagcacagatatttcagtcagcctgttagctgtcgttgtcagcttttgtggactggccttgttggttgtctcactttttgtcttctggaagctgtgttggccatgctggaaa

SEQ ID NO: 1004 - DNA, 255 bp, Homo sapiens
atgaaaatggcaagtttcctggccttccttctgctcaactttcgtgtctgcctccttttgcttcagctgctcatgcctcactcagctcagttttctgtgcttggaccctctgggcccatcctggccatggtgggtgaagacgctgatctgccctgtcacctgttcccgaccatgagtgcagagaccatggagctgaagtgggtgagttccagcctaaggcaggtggtgaacgtgtatgcagatggaaaggaagtg

SEQ ID NO: 1005 - DNA, 795 bp, Homo sapiens
atggccgctgccgtcccgaagaggatgagggggccagcacaagcgaaactgctgcccgggtcggccatccaagcccttgtggggttggcgcggccgctggtcttggcgctcctgcttgtgtccgccgctctatccagtgttgtatcacggactgattcaccgagcccaaccgtactcaactcacatatttctaccccaaatgtgaatgctttaacacatgaaaaccaaaccaaaccttctatttcccaaatcagcaccaccctccctcccacgacgagtaccaagaaaagtggaggagcatctgtggtccctcatccctcgcctactcctctgtctcaagaggaagctgataacaatgaagatcctagtatagaggaggaggatcttctcatgctgaacagttctccatccacagccaaagacactctagacaatggcgattatggagaaccagactatgactggaccacgggccccagggacgacgacgagtctgatgacaccttggaagaaaacaggggttacatggaaattgaacagtcagtgaaatcttttaagatgccatcctcaaatatagaagaggaagacagccatttcttttttcatcttattatttttgctttttgcattgctgttgtttacattacatatcacaacaaaaggaagatttttcttctggttcaaagcaggaaatggcgtgatggcctttgttccaaaacagtggaataccatcgcctagatcagaatgttaatgaggcaatgccttctttgaagattaccaatgattatattttt

SEQ ID NO: 1006 - DNA, 255 bp, Homo sapiens
atgacttcctcgctgcagcggccctggcgggtgccctggctaccatggaccatcctgctggtcagcactgcggctgcttcgcagaatcaagaacggctatgtgcgtttaaagatccgtatcagcaagaccttgggataggtgagagtagaatctctcatgaaaatgggacaatattatgctcgaaaggtagcacctgctatggcctttgggagaaatcaaaaggggacataaatcttgtaaaacaaggcaagtgt

SEQ ID NO: 1007 - DNA, 873 bp, Homo sapiens
atgggaatcctgtcattcttacctgtccttgccactgagagtgactgggctgactgcaagtccccccagccttggggtcatatgcttctgtggacagctgtgctattcctggctcctgttgctgggacacctgcagctcccccaaaggctgtgctgaaactcgagccccagtggatcaacgtgctccaggaggactctgtgactctgacatgccgggggactcacagccctgagagcgactccattcagtggttccacaatgggaatctcattcccacccacacgcagcccagctacaggttcaaggccaacaacaatgacagcggggagtacacgtgccagactggccagaccagcctcagcgaccctgtgcatctgactgtgctttctgagtggctggtgctccagacccctcacctggagttccaggagggagaaaccatcgtgctgaggtgccacagctggaaggacaagcctctggtcaaggtcacattcttccagaatggaaaatccaagaaattttcccgttcggatcccaacttctccatcccacaagcaaaccacagtcacagtggtgattaccactgcacaggaaacataggctacacgctgtactcatccaagcctgtgaccatcactgtccaagctcccagctcttcaccgatggggatcattgtggctgtggtcactgggattgctgtagcggccattgttgctgctgtagtggccttgatctactgcaggaaaaagcggatttcagccaatcccactaatcctgatgaggctgacaaagttggggctgagaacacaatcacctattcacttctcatgcacccggatgctctggaagagcctgatgaccagaaccgtatt

SEQ ID NO: 1008 - DNA, 255 bp, Homo sapiens
atgttgaagaaaatcagtgttggggttgcaggagacctaaacacagtcaccatgaagctgggctgtgtcctcatggcctgggccctctacctttcccttggtgtgctctgggtggcccagatgctactggctgccagttttgagacgctgcagtgtgagggacctgtctgcactgaggagagcagctgccacacggaggatgacttgactgatgcaagggaagctggcttccaggtcaaggcctacactttcagt

SEQ ID NO: 1009 - DNA, 255 bp, Homo sapiens
atggcaaggctgggaaactgcagcctgacttgggctgccctgatcatcctgctgctccccggaagtctggaggagtgcgggcacatcagtgtctcagcccccatcgtccacctgggggatcccatcacagcctcctgcatcatcaagcagaactgcagccatctggacccggagccacagattctgtggagactgggagcagagcttcagcccgggggcaggcagcagcgtctgtctgatgggacccaggaatct

SEQ ID NO: 1010 - DNA, 255 bp, Homo sapiens
atggaggccagcgggaagctcatttgcagacaaaggcaagtccttttttcctttctccttttgggcttatctctggcgggcgcggcggaacctagaagctattctgtggtggaggaaactgagggcagctcctttgtcaccaatttagcaaaggacctgggtctggagcagagggaattctccaggcggggggttagggttgtttccagagggaacaaactacatttgcagctcaatcaggagaccgcggatttg

SEQ ID NO: 1011 - DNA, 255 bp, Homo sapiens
atggaaaacggaggggcaggcactctgcagataaggcaagtcctgcttttctttgttttgctgggaatgtctcaggcgggctctgaaactgggaactttttggtgatggaggaattgcagagcgggagctttgtaggaaatttggcaaagaccctgggactcgaggtgagtgagctgtcttcgcggggggctcgggtggtttctaatgataacaaagagtgtttgcagctggacacaaacactggggatttgctc

SEQ ID NO: 1012 - DNA, 255 bp, Homo sapiens
atgaaaatggcaagttccctggctttccttctgctcaactttcatgtctccctcttcttggtccagctgctcactccttgctcagctcagttttctgtgcttggaccctctgggcccatcctggccatggtgggtgaagacgctgatctgccctgtcacctgttcccgaccatgagtgcagagaccatggagctgaggtgggtgagttccagcctaaggcaggtggtgaacgtgtatgcagatggaaaggaagtg

SEQ ID NO: 1013 - DNA, 255 bp, Homo sapiens
atgtcgctcatggtcatcagcatggcgtgtgttgggttcttcttgctgcagggggcctggacacatgagggtggtcaggacaagcccttgctgtctgcctggcccagcgctgtggtgcctcgaggaggacatgtgactcttctgtgtcgctctcgtcttgggtttaccatcttcagtctgtacaaagaagatggggtgcctgtccctgagctctacaacaaaatattctggaagagcatcctcatgggccctgtg

SEQ ID NO: 1014 - DNA, 255 bp, Homo sapiens
atgatcagcgcagcctggagcatcttcctcatcgggactaaaattgggctgttccttcaagtagcacctctatcagttatggctaaatcctgtccatctgtgtgtcgctgcgatgcgggtttcatttactgtaatgatcgctttctgacatccattccaacaggaataccagaggatgctacaactctctaccttcagaacaaccaaataaataatgctgggattccttcagatttgaaaaacttgctgaaagta

SEQ ID NO: 1015 - DNA, 255 bp, Homo sapiens
atggtggtggcacaccccaccgccactgccaccaccacgcccactgccactgtcacggccaccgttgtgatgaccacggccaccatggacctgcgggactggctgttcctctgctacgggctcatcgccttcctgacggaggtcatcgacagcaccacctgcccctcggtgtgccgctgcgacaacggcttcatctactgcaacgaccggggactcacatccatccccgcagatatccctgatgatgccaccacc

SEQ ID NO: 1016 - DNA, 255 bp, Homo sapiens
atgagacgctacaagctctttctcatgttctgtatggccggcctgtgcctcatctccttcctgcacttcttcaagaccctgtcctatgtcaccttcccccgagaactggcctccctcagccctaacctggtgtccagctttttctggaacaatgccccggtcacgccccaggccagccccgagccaggaggccctgacctgctgcgtaccccactctactcccactcgcccctgctgcagccgctgccgcccagc

SEQ ID NO: 1017 - DNA, 255 bp, Homo sapiens
atacgcacaccccctctttctttctgtgcaagcaagagggtcctggaacagcgggttctgaggaggctgggaggcagggctgagaggtggccgagagagaggagtcgcagagccgccagagtgagtcaggcacctccactgggattacagatcccagagcctcgaggagctggaagacatgtccccttctttcctctgcaccccagcccgcagccagccccccaccccccagcccctcctttctccctgctctca

SEQ ID NO: 1018 - DNA, 255 bp, Homo sapiens
atggcggcagcgtcccggagcgcctctggctgggcgctactgctgctggtggcactttggcagcagcgcgcggccggctccggcgtcttccagctgcagctgcaggagttcatcaacgagcgcggcgtactggccagtgggcggccttgcgagcccggctgccggactttcttccgcgtctgccttaagcacttccaggcggtcgtctcgcccggaccctgcaccttcgggaccgtctccacgccggtattgggc

SEQ ID NO: 1019 - DNA, 255 bp, Homo sapiens
atgctgctgctgctgctgcccctgctctgggggagggagagggcggaaggacagacaagtaaactgctgacgatgcagagttccgtgacggtgcaggaaggcctgtgtgtccatgtgccctgctccttctcctacccctcgcatggctggatttaccctggcccagtagttcatggctactggttccgggaaggggccaatacagaccaggatgctccagtggccacaaacaacccagctcgggcagtgtgggag

SEQ ID NO: 1020 - DNA, 255 bp, Homo sapiens
gtattaataggggaccctattaccacatgtctttctccctcagtgtatgatataatttgtaatcttgggtttcaactcagagaaaattgtgatatcaatagcattgtaactcagaatggtgaagtatgctggaaaacaatcacagactgtgtgagctacacagagtcagagcagggtctggattactggggaagcgtgaggctgctgggccctgtgtgtgaggctgtccattcacatttcttatctctgaccaag

SEQ ID NO: 1021 - DNA, 255 bp, Homo sapiens
ctggacatgtcctgtccgctgctgcagcagaacaagcaggtggtcccagtgtccagccaccgcaacccccggctggacctggctgcttacgaccaggagggccgccggttcgacaacttcagctctctgagcatccagtgggagtccaccaggccagtgttggccagcatcgagcctgagctgcccatgcagctggtgtcccaggacgatgagagtggccaaaagaagctgcacggtttgcaggccattttggtt

SEQ ID NO: 1022 - DNA, 255 bp, Homo sapiens
atgggaagatacagtgcagtcggaagtgttactgagagaattttcacattatactatgatcacttgggattcctacataagctgactctgggtcgctttgaagctagtggaccacccacagcctttggaaattctagaaatctttttggacagcctccagatatgggctttgagactgcgcttgccccacagcacacctccttagatgaaattatcttttttgcatatgtacctgagaacgaaccccaggaaacg

SEQ ID NO: 1023 - DNA, 255 bp, Homo sapiens
atgaggtcagtgcagatcttcctctcccaatgccgtttgctccttctactagttccgacaatgctccttaagtctcttggcgaagatgtaatttttcaccctgaaggggagtttgactcgtatgaagtcaccattcctgagaagctgagcttccggggagaggtgcagggtgtggtcagtcccgtgtcctacctactgcagttaaaaggcaagaagcacgtcctccatttgtggcccaagagacttctgttgccc

SEQ ID NO: 1024 - DNA, 699 bp, Homo sapiens
atggataaccaaggagtaatctactcagacctgaatctgcccccaaacccaaagaggcagcaacgaaaacctaaaggcaataaaaactccattttagcaactgaacaggaaataacctatgcggaattaaaccttcaaaaagcttctcaggattttcaagggaatgacaaaacctatcactgcaaagatttaccatcagctccagagaagctcattgttgggatcctgggaattatctgtcttatcttaatggcctctgtggtaacgatagttgttattccctctacattaatacagaggcacaacaattcttccctgaatacaagaactcagaaagcacgtcattgtggccattgtcctgaggagtggattacatattccaacagttgttactacattggtaaggaaagaagaacttgggaagagagtttgctggcctgtacttcgaagaactccagtctgctttctatagataatgaagaagaaatgaaatttctgtccatcatttcaccatcctcatggattggtgtgtttcgtaacagcagtcatcatccatgggtgacaatgaatggtttggctttcaaacatgagataaaagactcagataatgctgaacttaactgtgcagtgctacaagtaaatcgacttaaatcagcccagtgtggatcttcaataatatatcattgtaagcataagctt

SEQ ID NO: 1025 - DNA, 255 bp, Homo sapiens
atgtggctgggccgccgggccctgtgcgctctggtccttctgctcgcctgcgcctcgctggggctcctgtacgcgagcacccgggacgcgcccggcctccggctacctcttgcgccgtgggcgcccccgcaaagcccccgcaggcccgagctgccagatcttgctcctgagccccgctacgcacacatcccggtcaggatcaaggagcaagtagtggggctgctggcttggaacaactgcagttgtgagtccagt

SEQ ID NO: 1026 - DNA, 255 bp, Homo sapiens
atggcccatgtgggggactgcacgcagacgccctggctccccgtcctggtggtgtctctgatgtgctcagcccgagcggaatactcaaactgcggtgagaacgagtactacaaccagactacggggctgtgccaggagtgccccccgtgtgggccgggagaggagccctacctgtcctgtggctacggcaccaaagacgaggactacggctgcgtcccctgcccggcggagaagttttccaaaggaggctaccag

SEQ ID NO: 1027 - DNA, 255 bp, Homo sapiens
atggctgaggccatcacctatgcagatctgaggtttgtgaaggctcccctgaagaagagcatctccagccggttaggacaggacccaggggctgatgatgatggggaaatcacctacgagaatgttcaagtgcccgcagtcctaggggtgccctcaagcttggcttcttctgtactaggggacaaagcagcggtcaagtcggagcagccaactgcgtcctggagagccgtgacgtcaccagctgtcgggcggatt

SEQ ID NO: 1028 - DNA, 255 bp, Homo sapiens
atggagctgtgcgggctggggctgccccggccgcccatgctgctggcgctgctgttggcgacactgctggcggcgatgttggcgctgctgactcaggtggcgctggtggtgcaggtggcggaggcggctcgggccccgagcgtctcggccaagccggggccggcgctgtggcccctgccgctcttggtgaagatgaccccgaacctgctgcatctcgccccggagaacttctacatcagccacagccccaattcc

SEQ ID NO: 1029 - DNA, 255 bp, Homo sapiens
atgaatgtgatttattttcctttacatatttttgttgtgtacagcagggcatatacttctcttgtcttggttggatgcacaaatctgtgtgcagtgctttttgcccgttgcctagacgatcacttggtttctctgaggatgtctggttctcgtaaagagtttgatgtgaaacagattttgaaaatcagatggaggtggtttggtcatcaagcatcatctcctaattctacagttgacagccagcagggagaattt

SEQ ID NO: 1030 - DNA, 438 bp, Homo sapiens
atggcgactgcggaagctagcggcagcgatgggaaagggcaggaagtcgagacctcagtcacctattaccggttggaggaggtggcaaagcgcaactccttgaaggaactgtggcttgtgatccatgggcgagtctacgatgtcacccgcttcctcaacgagcaccctggaggagaagaggttctgctggaacaagctggtgtagatgcaagtgaaagctttgaagatgtaggacactcttctgatgccagagaaatgctaaagcagtactacattggtgatatccatccgagtgaccttaaacctgaaagtggtagcaaggacccttcaaaaaatgatacatgcaaaagttgctgggcatattggattttacccatcataggcgctgttctcttaggtttcctgtaccgctactacacatcggaaagcaaatcctcc

SEQ ID NO: 1031 - DNA, 621 bp, Homo sapiens
atgcagccctcaggctgggcggccgccagggaggcggcgggccgcgacatgctggccgccgacctccggtgcagcctcttcgcctcggccctgcagagctacaagcgcgactcggtgctgcggcccttccccgcgtcctacgcccgcggcgactgtaaggactttgaagccctgacatccttgttcggagaggggacctacctcaccagtgacttgagcctggccctcatatacagcccccatggccatgggtggcagcacagcctcctcggccccatccttagctgtgtggccgtgtgtgaggtcattgaccatccggacgtcaagtgccaaaccaagaagaaggattccaaggagatagatcgcagacgagcgagaatcaaacatagtgaagggggagacatccctcccaagtacttcgtggtcaccaataaccagctgctgcgagtgaagtacctcctggtgtattcacagaagccacccaagagggcttcgagccagctctcctggttttccagccattggtttaccgtcatgatatccctgtatctgctgctgctgctcatagtgagtgtcatcaactcctctgctttccaacacttttggaatcgtgcgaaaaga

SEQ ID NO: 1032 - DNA, 255 bp, Homo sapiens
atgaagttgggcaaagtggagttctgccattttctgcagctaatagctcttttcctgtgtttttctgggatgagtcaagcagaactctcaaggtccagatcaaagccctatttccaatcagggaggtcccggaccaagcgcagctgggtgtggaatcagttctttgtgctggaggaatacatgggttcagaccccctctatgtaggaaagcttcactctgatgttgataaaggagatggttccatcaaatacatc

SEQ ID NO: 1033 - DNA, 255 bp, Homo sapiens
atgccgctgctgctactgctgcccctgctgtgggcaggggccctggctatggatccaaatttctggctgcaagtgcaggagtcagtgacggtacaggagggtttgtgcgtcctcgtgccctgcactttcttccatcccataccctactacgacaagaactccccagttcatggttactggttccgggaaggagccattatatccagggactctccagtggccacaaacaagctagatcaagaagtacaggaggag

SEQ ID NO: 1034 - DNA, 255 bp, Homo sapiens
atgagctgcgtcctgggtggtgtcatccccttggggctgctgttcctggtctgcggatcccaaggctacctcctgcccaacgtcactctcttagaggagctgctcagcaaataccagcacaacgagtctcactcccgggtccgcagagccatccccagggaggacaaggaggagatcctcatgctgcacaacaagcttcggggccaggtgcagcctcaggcctccaacatggagtacatgacctgggatgacgaa

SEQ ID NO: 1035 - DNA, 255 bp, Homo sapiens
atgttggtggatggcccatctgagcggccagccctgtgcttcttgctgttggctgtggcaatgtctttcttcggctcagctctatccatagatgaaacacgggcgcatctgttgttgaaagaaaagatgatgcggctgggggggcggctggtgctgaataccaaggaggagctggccaatgagaggctcatgacgctcaaaatcgctgagatgaaggaggccatgaggaccctgatattcccacccagcatgcac

SEQ ID NO: 1036 - DNA, 339 bp, Homo sapiens
atggggggacttgaaccctgcagcaggctcctgctcctgcctctcctgctggctgtaagtggtctccgtcctgtccaggcccaggcccagagcgattgcagttgctctacggtgagcccgggcgtgctggcagggatcgtgatgggagacctggtgctgacagtgctcattgccctggccgtgtacttcctgggccggctggtccctcgggggcgaggggctgcggaggcagcgacccggaaacagcgtatcactgagaccgagtcgccttatcaggagctccagggtcagaggtcggatgtctacagcgacctcaacacacagaggccgtattacaaa

SEQ ID NO: 1037 - DNA, 255 bp, Homo sapiens
atggagcaaactgactgcaaaccctaccagcctctaccaaaagtcaagcatgaaatggatctagcttacaccagttcttctgatgagagtgaagatggaagaaaaccaagacagtcatacaactccagggagaccctgcacgagtataaccaggagctgaggatgaattacaatagccagagtagaaagaggaaagaagtagaaaaatctactcaagagatggaattctgtgaaacctctcacactctgtgctct

SEQ ID NO: 1038 - DNA, 255 bp, Homo sapiens
atggtgctggcccaggggctgctctccatggccctgctggccctgtgctgggagcgcagcctggcaggggcagaagaaaccatcccgctgcagaccctgcgctgctacaacgactacaccagccacatcacctgcaggtgggcagacacccaggatgcccagcggctcgtcaacgtgaccctcattcgccgggtgaatgaggacctcctggagccagtgtcctgtgacctcagtgatgacatgccctggtcagcc

SEQ ID NO: 1039 - DNA, 255 bp, Homo sapiens
atggagcccgccggcccggcccccggccgcctcgggccgctgctctgcctgctgctcgccgcgtcctgcgcctggtcaggagtggcgggtgaggaggagctgcaggtgattcagcctgacaagtccgtgttggttgcagctggagagacagccactctgcgctgcactgcgacctctctgatccctgtggggcccatccagtggttcagaggagctggaccaggccgggaattaatctacaatcaaaaagaaggc

SEQ ID NO: 1040 - DNA, 255 bp, Homo sapiens
atggtggcaccaaagagtcacacagatgactgggctcctgggcctttctccagtaagccacagaggagtcagctgcaaatattctcttctgttctacagacctctctcctcttcctgctcatgggactaagagcctctggaaaggactcagccccaacagtggtgtcagggatcctagggggttccgtgactctccccctaaacatctcagtagacacagagattgagaacgtcatctggattggtcccaaaaat

SEQ ID NO: 1041 - DNA, 255 bp, Homo sapiens
atgatggatatttacgtatgtttgaaacgaccatcctggatggtggacaataaaagaatgaggactgcttcaaatttccagtggctgttatcaacatttattcttctatatctaatgaatcaagtaaatagccagaaaaagggggctcctcatgatttgaagtgtgtaactaacaatttgcaagtgtggaactgttcttggaaagcaccctctggaacaggccgtggtactgattatgaagtttgcattgaaaac

SEQ ID NO: 1042 - DNA, 255 bp, Homo sapiens
gcttcctgcctcggacggctcagctggtatgacccagatttccaggcaaggctcacccgttccaactcgaagtgccagggccagctggaggtctacctcaaggacggatggcacatggtttgcagccagagctggggccggagctccaagcagtgggaggaccccagtcaagcgtcaaaagtctgccagcggctgaactgtggggtgcccttaagccttggccccttccttgtcacctacacacctcagagctca

SEQ ID NO: 1043 - DNA, 255 bp, Homo sapiens
gaaggtggggaccaaagtgaggaagagccgagggaacgcagccaggcaggtggaatgggaactctctggagccaagagagcactccagaagagaggctgcccgtggaagggagcaggccatgggcagtggccaggcgggtgctgacagctatcctgattttgggcctgctcctttgtttttctgtgcttttgttctacaacttccagaactgtggccctcgcccctgtgagacatctgtgtgtttggatctccgg

SEQ ID NO: 1044 - DNA, 255 bp, Homo sapiens
ctttcggcagaacacacctcttctttggtgccttctctgcatatcaccacactgggtcaagagcaagccatcctttctggggcggttcccgcatcaccatcaactgggacagccgactttccctccatacttactttcctccagcccacagagaatcatgcctccccatctcctgtgccagaaatgcccactcttccagcagagggcagtgatgggtcccctcctgcaactagagacttgctcctctcaagcaaa

SEQ ID NO: 1045 - DNA, 255 bp, Homo sapiens
gcggccgcggggcccggcgcggcgcgggccaaggagacggcgttcgtggaggtggtgctgttcgagtcgagcccaagcggcgattacaccacctacaccaccggcctcacgggccgcttctcgcgggccggggccacgctcagcgccgagggcgagatcgtgcagatgcacccactgggcctatgtaataacaatgacgaagaggacttgtatgaatatggctgggtaggagtggtgaagctggaacagccagaa

SEQ ID NO: 1046 - DNA, 255 bp, Homo sapiens
atgggcggcccgcgggcttgggcgctgctctgcctcgggctcctgctcccgggaggcggcgctgcgtggagcatcggggcagctccgttctccggacgcaggaactggtgctcctatgtggtgacccgcaccatctcatgccatgtgcagaatggcacctaccttcagcgagtgctgcagaactgcccctggcccatgagctgtccggggagcagctacagaactgtggtgagacccacatacaaggtgatgtac

SEQ ID NO: 1047 - DNA, 585 bp, Homo sapiens
atgactgacagtgttatttattccatgttagagttgcctacggcaacccaagcccagaatgactatggaccacagcaaaaatcttcctcttccaggccttcttgttcttgccttgtggcaatagctttggggcttctgactgcagttcttctgagtgtgctgctataccagtggatcctgtgccagggctccaactactccacttgtgccagctgtcctagctgcccagaccgctggatgaaatatggtaaccattgttattatttctcagtggaggaaaaggactggaattctagtctggaattctgcctagccagagactcacacctccttgtgataacggacaatcaggaaatgagcctgctccaagttttcctcagtgaggccttttgctggattggtctgaggaacaattctggctggaggtgggaagatggatcacctctaaacttctcaaggatttcttctaatagctttgtgcagacatgcggtgccatcaacaaaaatggtcttcaagcctcaagctgtgaagttcctttacactgggtgtgtaagaagtgtccctttgcagatcaagctttattc

SEQ ID NO: 1048 - DNA, 255 bp, Homo sapiens
atgagggcgaacgacgctctgcaggtgctgggcttgcttttcagcctggcccggggctccgaggtgggcaactctcaggcagtgtgtcctgggactctgaatggcctgagtgtgaccggcgatgctgagaaccaataccagacactgtacaagctctacgagaggtgtgaggtggtgatggggaaccttgagattgtgctcacgggacacaatgccgacctctccttcctgcagtggattcgagaagtgacaggc

SEQ ID NO: 1049 - DNA, 255 bp, Homo sapiens
atgctaccgctgctgctgcccctgctgtgggcaggggccctggctcaggagcggagattccagctggaggggccagagtcactgacggtgcaggagggtctgtgcgtcctcgtaccctgcagattgcccactacccttccagcctcgtactatggttatggctactggttcctggaaggggctgatgttccagtggccacaaacgacccagacgaagaagtgcaggaggagacccggggccgattccacctcctc

SEQ ID NO: 1050 - DNA, 255 bp, Homo sapiens
gaggaacagctgccccctgggttcccttccatcgacatggggcctcagctgaaggtggtggagaaggcacgcacagccaccatgctatgtgccgcaggcggaaatccagaccctgagatttcttggttcaaggacttccttcctgtagaccctgccacgagcaacggccgcatcaagcagctgcgttcaggtgccttgcagatagagagcagtgaggaatccgaccaaggcaagtacgagtgtgtggcgaccaac

SEQ ID NO: 1051 - DNA, 657 bp, Homo sapiens
atggccgggctatcccgcgggtccgcgcgcgcactgctcgccgccctgctggcgtcgacgctgttggcgctgctcgtgtcgcccgcgcggggtcgcggcggccgggaccacggggactgggacgaggcctcccggctgccgccgctaccaccccgcgaggacgcggcgcgcgtggcccgcttcgtgacgcacgtctccgactggggcgctctggccaccatctccacgctggaggcggtgcgcggccggcccttcgccgacgtcctctcgctcagcgacgggcccccgggcgcgggcagcggcgtgccctatttctacctgagcccgctgcagctctccgtgagcaacctgcaggagaatccatatgctacactgaccatgactttggcacagaccaacttctgcaagaaacatggatttgatccacaaagtcccctttgtgttcacataatgctgtcaggaactgtgaccaaggtgaatgaaacagaaatggatattgcaaagcattcgttattcattcgacaccctgagatgaaaacctggccttccagccataattggttctttgctaagttgaatataaccaatatctgggtcctggactactttggtggaccaaaaatcgtgacaccagaagaatattataatgtcacagtt

SEQ ID NO: 1052 - DNA, 255 bp, Homo sapiens
gaaatcgagcaggagcgggtgaagtcagcgggggcctggatcatccacccctacagcgacttccggttttactgggacctgatcatgctgctgctgatggtggggaacctcatcgtcctgcctgtgggcatcaccttcttcaaggaggagaactccccgccttggatcgtcttcaacgtattgtctgatactttcttcctactggatctggtgctcaacttccgaacgggcatcgtggtggaggagggtgctgag

SEQ ID NO: 1053 - DNA, 255 bp, Homo sapiens
atggccttgctcatccacctcaagacagtctcggagctgcggggcaggggcgaccggatcgccaaagtgactttccgagggcaatccttctactctcgggtcctggagaactgtgaggatgtggctgactttgatgagacatttcggtggccggtggccagcagcatcgacagaaatgagatgctggagattcaggttttcaactacagcaaagtcttcagcaacaagctcatcgggaccttccgcatggtgctg

SEQ ID NO: 1054 - DNA, 255 bp, Homo sapiens
gcagcagggtcctcaggctgggcctgggtccccaaccactgcaggagccctggccaggccgtgtgcaacttcgtgtgtgactgcagggactgctcagatgaggcccagtgtggttaccacggggcctcgcccaccctgggcgcccccttcgcctgtgacttcgagcaggacccctgcggctggcgggacattagtacctcaggctacagctggctccgagacagggcaggggccgcactggagggtcctgggcct

SEQ ID NO: 1055 - DNA, 255 bp, Homo sapiens
atgagggtggcattaggcatgctctggctcttggcccttgcgtggcccccccaggcccggggcttctgcccctctcaatgcagctgcagcctccatatcatgggtgatggcagcaaggccaggacagtagtgtgcaacgaccccgacatgaccctgcccccggcgtccatccccccggacacctccagactgcgcctggagcggacggccatacgcagggttcctggcgaggccttcaggcccctgggccgcctg

SEQ ID NO: 1056 - DNA, 255 bp, Homo sapiens
tggggttaccctgtggccctgctactgctggtcgccaccctggggctgggtaggtggctccagcccgaccctggcctcccaggcctccggcacagctacgactgtgggatcaagggaatgcagctgctggtgttccccaggccaggccagactctccgcttcaaggtggtggatgaatttgggaaccgatttgatgtcaacaactgctccatctgctaccactgggtcacctccaggccgcaggagcctgcagtc

SEQ ID NO: 1057 - DNA, 255 bp, Homo sapiens
atggattatcctactttacttttggctcttcttcatgtatacagagctctatgtgaagaggtgctttggcatacatcagttccctttgccgagaacatgtctctagaatgtgtgtatccatcaatgggcatcttaacacaggtggagtggttcaagatcgggacccagcaggattccatagccattttcagccctactcatggcatggtcataaggaagccctatgctgagagggtttactttttgaattcaacg

SEQ ID NO: 1058 - DNA, 255 bp, Homo sapiens
atggctgggattttctatttcgccctattttcgtgtctcttcgggatttgcgacgctgtcacaggttccagggtataccccgcgaatgaagttaccttattggattccagatctgttcagggagaacttgggtggatagcaagccctctggaaggagggtgggaggaagtgagtatcatggatgaaaaaaatacaccaatccgaacctaccaagtgtgcaatgtgatggaacccagccagaataactggctacga

SEQ ID NO: 1059 - DNA, 429 bp, Homo sapiens
gcacagagctttggcctgctggatcccaaactctgctacctgctggatggaatcctcttcatctatggtgtcattctcactgccttgttcctgagagtgaagttcagcaggagcgcagacgcccccgcgtaccagcagggccagaaccagctctataacgagctcaatctaggacgaagagaggagtacgatgttttggacaagagacgtggccgggaccctgagatggggggaaagccgagaaggaagaaccctcaggaaggcctgtacaatgaactgcagaaagataagatggcggaggcctacagtgagattgggatgaaaggcgagcgccggaggggcaaggggcacgatggcctttaccagggtctcagtacagccaccaaggacacctacgacgcccttcacatgcaggccctgccccctcgc

SEQ ID NO: 1060 - DNA, 255 bp, Homo sapiens
atggagccttctgaagtacctagtcagattagcaaagataattttttagaagttcctaatttatctgactctctttgtgaagatgaagaagttactttccaacctggtttctcccctcaaccaagtagacgaggttctgattcttctgaagacatatacctggataccccatcttcaggtactagaagagtttcatttgctgattcctttggattcaatcttgtgtctgttaaagaatttgattgctgggaatta

SEQ ID NO: 1061 - DNA, 255 bp, Homo sapiens
atggcgaggagtctctgtccgggggcctggctaaggaaaccctattacctccaggctcgcttctcatatgtgcggatgaaatatcttttcttttcctggttagtggtttttgttggaagctggattatatatgtgcagtattctacctatacagaattatgcagaggaaaggactgtaagaaaataatatgtgacaagtacaagactggagttattgatgggcctgcatgtaacagcctttgtgttacagaaact

SEQ ID NO: 1062 - DNA, 255 bp, Homo sapiens
atgactgaactacagcaagatgtggaagacacaaagcctgcgaaagtgctcgggaagagggagagcaaacttggctcagcccactcagaggctgagaatggtgtggaggagaaaaagaaagcctgcaggtcgccaacagcccaatcccctaccccatctgtggaggcggactccccagaccagaagaaaatcattagcctatggtcaaaatccagttttgatggtgcctctttagcaagtgataagaacgactgt

SEQ ID NO: 1063 - DNA, 255 bp, Homo sapiens
atggggatcttactgggcctgctactcctggggcacctaacagtggacacttatggccgtcccatcctggaagtgccagagagtgtaacaggaccttggaaaggggatgtgaatcttccctgcacctatgaccccctgcaaggctacacccaagtcttggtgaagtggctggtacaacgtggctcagaccctgtcaccatctttctacgtgactcttctggagaccatatccagcaggcaaagtaccagggccgc

SEQ ID NO: 1064 - DNA, 450 bp, Homo sapiens
gatacagttgatatattagttggatggcatatagatcatactcagaaaccttcgctcacgcagcaggtatctgaagacatggaagcatatgctgagattctgtacagagtaatgagatgtgtgacggctgcaaaccaggtgtttttttctgaggctgtgttgacagctgctaatgagtgtgttggtgttttgctcggcagcttggatcctagcatgactatacattgtgacatggtcattacatatggattagaccaactggagaattgccagacttgtggtaccgattatatcatctcagtcttgaatttactcatgctgatgtgggcgctatctccaactgtctttgcacttctgagtaagaatctgatgattgtgcacagtgacctggctgttcacttccctaccattcagtatgctgtgctctacactttgtattctcattgtacc

SEQ ID NO: 1065 - DNA, 255 bp, Homo sapiens
atgctgtttctgcagtttctgctgctagctcttcttctcccaggtggtgacaatgcagacgcatcccaggaacacgtctccttccatgtcatccagatcttctcatttgtcaaccaatcctgggcacgaggtcagggctcaggatggctggacgagttgcagactcatggctgggacagtgaatcaggcacaataattttcctgcataactggtccaagggcaacttcagcaatgaagagttgtcagacctagag

SEQ ID NO: 1066 - DNA, 255 bp, Homo sapiens
atggaaaatactcctccaggaactgtgtttcctctgaaaaatacacaagatttggatgtggccatcaataacatccaaaactacaccatctacccctactcccatgtccacgctctcacccaaaatggcagtgaaggcagaaaatacccagagctggttctggacaaagccctggatcgggaggagcaggctgagatcagagattcagacatgggaattaatgaacaacagccccgccctgcatattggcagcgt

SEQ ID NO: 1067 - DNA, 258 bp, Homo sapiens
atgattccagcagtggtcttgctcttactccttttggttgaacaagcagcggccctgggagagcctcagctctgctatatcctggatgccatcctgtttctgtatggaattgtcctcaccctcctctactgtcgactgaagatccaagtgcgaaaggcagctataaccagctatgagaaatcagatggtgtttacacgggcctgagcaccaggaaccaggagacttacgagactctgaagcatgagaaaccaccacag

SEQ ID NO: 1068 - DNA, 255 bp, Homo sapiens
atgcttttgagccagaatgccttcatcttcagatcacttaatttggttctcatggtgtatatcagcctcgtgtttggtatttcatatgattcgcctgattacacagatgaatcttgcactttcaagatatcattgcgaaatttccggtccatcttatcatgggaattaaaaaaccactccattgtaccaactcactatacattgctgtatacaatcatgagtaaaccagaagatttgaaggtggttaagaactgt

SEQ ID NO: 1069 - DNA, 255 bp, Homo sapiens
atgctgctgctgcccctgctgctgcccgtgctgggggcggggtccctgaacaaggatcccagttacagtcttcaagtgcagaggcaggtgccggtgccggagggcctgtgtgtcatcgtgtcttgcaacctctcctacccccgggatggctgggacgagtctactgctgcttatggctactggttcaaaggacggaccagcccaaagacgggtgctcctgtggccactaacaaccagagtcgagaggtggaaatg

SEQ ID NO: 1070 - DNA, 747 bp, Homo sapiens
atggccgcccgtcggagccagaggcggagggggcgccggggggagccgggcaccgccctgctggtcccgctcgcgctgggcctgggcctggcgctggcctgcctcggcctcctgctggccgtggtcagtttggggagccgggcatcgctgtccgcccaggagcctgcccaggaggagctggtggcagaggaggaccaggacccgtcggaactgaatccccagacagaagaaagccaggatcctgcgcctttcctgaaccgactagttcggcctcgcagaagtgcacctaaaggccggaaaacacgggctcgaagagcgatcgcagcccattatgaagttcatccacgacctggacaggacggagcgcaggcaggtgtggacgggacagtgagtggctgggaggaagccagaatcaacagctccagccctctgcgctacaaccgccagatcggggagtttatagtcacccgggctgggctctactacctgtactgtcaggtgcactttgatgaggggaaggctgtctacctgaagctggacttgctggtggatggtgtgctggccctgcgctgcctggaggaattctcagccactgcggcgagttccctcgggccccagctccgcctctgccaggtgtctggtctgttggccctgcggccagggtcctccctgcggatccgcaccctcccctgggcccatctcaaggctgcccccttcctcacctacttcggactcttccaggttcac

SEQ ID NO: 1071 - DNA, 255 bp, Homo sapiens
atgcctgggaagatggtcgtgatccttggagcctcaaatatactttggataatgtttgcagcttctcaagcttttaaaatcgagaccaccccagaatctagatatcttgctcagattggtgactccgtctcattgacttgcagcaccacaggctgtgagtccccatttttctcttggagaacccagatagatagtccactgaatgggaaggtgacgaatgaggggaccacatctacgctgacaatgaatcctgtt

SEQ ID NO: 1072 - DNA, 255 bp, Homo sapiens
gaaatactacagagtgtgccaaagttctgttttccctttgacgttgaaagggtgtctcagaatcaagttggacagcactttacctttgtactgacagacattgaaagtaaacagagatttggattctgcagactgacgtcaggaggcacaatttgtttatgcatccttagttaccttccctggtttgaagtgtattacaagcttctaaatactcttgcagattacttggctaaggaactggaaaatgatttgaat

SEQ ID NO: 1073 - DNA, 255 bp, Homo sapiens
atgggagaccacctggaccttctcctaggagtggtgctcatggccggtcctgtgtttggaattccttcctgctcctttgatggccgaatagccttttatcgtttctgcaacctcacccaggtcccccaggtcctcaacaccactgagaggctcctgctgagcttcaactatatcaggacagtcactgcttcatccttcccctttctggaacagctgcagctgctggagctcgggagccagtatacccccttgact

SEQ ID NO: 1074 - DNA, 255 bp, Homo sapiens
atggatgacagcgatactcctacatattatctgcaaatagaaccacaagatggatgtcatcctggtgacagcgtggaaaggagtgtgacctgtctgccttctgcatcagatgaaaatgaaaatcagcttgacggggacgggcatgagcatctgaccagcagtgacagtgcgatgggaaagccccaagtgtctgagcaggacagtctcaataataatgaaagctgcacattgagctgcgaggtggctgcaggtgag

SEQ ID NO: 1075 - DNA, 255 bp, Homo sapiens
atgcggaggttactggaaccgtgttggtggattttgttcctgaaaatcaccagttccgtgctccattatgtcgtgtgcttccccgcgttgacagaaggctacgttggggccctgcacgagaatagacacggcagcgcagtgcagatccgcaggcgcaaggcttcaggcgacccgtactgggcctactctggtgcctatggtcctgagcactgggtcacgtctagtgtcagctgtgggggccgtcaccagtctcct

SEQ ID NO: 1076 - DNA, 255 bp, Homo sapiens
ctaccggcgatgctactgctgtgggtgtcggtggtcgcagccttggcgctggcggtactggcccccggagcaggggagcagaggcggagagcagccaaagcgcccaatgtggtgctggtcgtgagcgactccttcgatggaaggttaacatttcatccaggaagtcaggtagtgaaacttccttttatcaactttatgaagacacgtgggacttcctttctgaatgcctacacaaactctccaatttgttgccca

SEQ ID NO: 1077 - DNA, 255 bp, Homo sapiens
atgagacagactttgccttgtatctacttttgggggggccttttgccctttgggatgctgtgtgcatcctccaccaccaagtgcactgttagccatgaagttgctgactgcagccacctgaagttgactcaggtacccgatgatctacccacaaacataacagtgttgaaccttacccataatcaactcagaagattaccagccgccaacttcacaaggtatagccagctaactagcttggatgtaggatttaac

SEQ ID NO: 1078 - DNA, 255 bp, Homo sapiens
atgctccagttgtggaaggtggtacgcccagctcggcagctggaactgcaccgcctcatactgctgctgatcgctttcagcctgggctccatgggcttcctggcttattatgtgtccaccagccctaaggccaaggaacccttgcccctgcccttgggagactgcagcagcggtggggcagctggtcctggccctgcacggcctccagttccacctcggccccccaggcctccagagacagctcgaactgaaccc

SEQ ID NO: 1079 - DNA, 438 bp, Homo sapiens
gccactggcacctactactgctctgtccactggccacactccacggtgagaggcagcggcaccttcatcctggtcagagacgcagggtaccgagagcccccgcagagtccacagaagctcctgctctttggcttcaccggcctcctgagtgtcctgagtgtagtgggcacggccctgctgctctggaacaagaagcggatgcggggtccagggaaggaccccaccaggaagtgcccagatccaagatctgccagcagccccaagcagcatccttcagaatctgtctacacagctctgcagcgccgcgagaccgaggtctatgcctgcatcgagaatgaggatggcagctcacccaccgccaagcagagccccctctcccaggagagaccgcatagattcgaagatgatggcgaacttaacctggtctatgaaaatctc

SEQ ID NO: 1080 - DNA, 897 bp, Homo sapiens
atgtggctgccttgggctctgttgcttctctgggtcccaggatgttttgctctgagcaaatgcaggaccgtggcgggccccgtggggggatccctgagtgtgcagtgtccctatgagaaggaacacaggaccctcaacaaatactggtgcagaccaccacagattttcctatgtgacaagattgtggagaccaaagggtcagcaggaaaaaggaacggccgagtgtccatcagggacagtcctgcaaacctcagcttcacagtgaccctggagaatctcacagaggaggatgcaggcacctactggtgtggggtggatacaccatggctccgagactttcatgatcccgttgtcgaggttgaggtgtccgtgttcccggcatcaacgtcaatgacacctgcaagtatcactgcggccaagacctcaacaatcacaactgcatttccacctgtatcatccactaccctgtttgcagtgggtgccacccacagtgccagcatccaggaggaaactgaggaggtggtgaactcacagctcccgctgctcctctccctgctggcattgttgctgcttctgttggtgggggcctccctgctagcctggaggatgtttcagaaatggatcaaagctggtgaccattcagagctgtcccagaaccccaagcaggctgccacgcagagtgagctgcactacgcaaatctggagctgctgatgtggcctctgcaggaaaagccagcaccaccaagggaggtggaggtggaatacagcactgtggcctcccccagggaagaacttcactatgcctcggtggtgtttgattctaacaccaacaggatagctgctcagaggcctcgggaggaggaaccagattcagattacagtgtgataaggaagaca

SEQ ID NO: 1081 - DNA, 255 bp, Homo sapiens
atgggagtgaggcacccgccctgctcccaccggctcctggccgtctgcgccctcgtgtccttggcaaccgctgcactcctggggcacatcctactccatgatttcctgctggttccccgagagctgagtggctcctccccagtcctggaggagactcacccagctcaccagcagggagccagcagaccagggccccgggatgcccaggcacaccccggccgtcccagagcagtgcccacacagtgcgacgtcccc

SEQ ID NO: 1082 - DNA, 255 bp, Homo sapiens
atgctgctgctgctgctgctgcccctgctctgggggagggagagggtggaaggacagaagagtaaccggaaggattactcgctgacgatgcagagttccgtgaccgtgcaagagggcatgtgtgtccatgtgcgctgctccttctcctacccagtggacagccagactgactctgacccagttcatggctactggttccgggcagggaatgatataagctggaaggctccagtggccacaaacaacccagcttgg

SEQ ID NO: 1083 - DNA, 255 bp, Homo sapiens
atgctcaccctggatgccaaccctctcaagaccctgtggaatcactccctccagccttaccctctcctggagagcctcagcctgcacagctgccacctggagcgcatcagccgcggcgccttccaggagcaaggtcacctgcgcagcctggtcctgggggacaactgcctctcagagaactacgaagagacggcagccgccctccacgccctgccgggcctgcggaggctggacttgtcaggaaacgccctgacg

SEQ ID NO: 1084 - DNA, 255 bp, Homo sapiens
atgctgatgttgatgctggtggcggctgtgaccatgtggctccgaccgctggtcacagctcagctctgtcgttctcgcacagtgaggacaggaaaagtgtttaatctgatacaggacgttcaaggggaccgcctgtattttcatcctacaacaacacgcttgattaaacatccttgcgagaaaaatatagcactatatctagggaaacaagtttttttcacaatggataactttgagactagtctccttccattt

SEQ ID NO: 1085 - DNA, 255 bp, Homo sapiens
atgcttctgtggctgctgctgctgatcctgactcctggaagagaacaatcaggggtggccccaaaagctgtacttctcctcaatcctccatggtccacagccttcaaaggagaaaaagtggctctcatatgcagcagcatatcacattccctagcccagggagacacatattggtatcacgatgagaagttgttgaaaataaaacatgacaagatccaaattacagagcctggaaattaccaatgtaagacccga

SEQ ID NO: 1086 - DNA, 339 bp, Homo sapiens
ctgactgccagcctgttgagggcagtcatagcctccatctgtgttgtatccagcatggctcagaaggtaactcaagcgcagactgaaatttctgtggtggagaaggaggatgtgaccttggactgtgtgtatgaaacccgtgatactacttattacttattctggtacaagcaaccaccaagtggagaattggttttccttattcgtcggaactcttttgatgagcaaaatgaaataagtggtcggtattcttggaacttccagaaatccaccagttccttcaacttcaccatcacagcctcacaagtcgtggactcagcagtatacttctgtgctctg

SEQ ID NO: 1087 - DNA, 492 bp, Homo sapiens
atgcctgacaccatgctgcccgcctgcttcctcggcctactggccttctcctccgcgtgctacttccagaactgcccgaggggcggcaagagggccatgtccgacctggagctgagacagtgcctcccctgcggccccgggggcaaaggccgctgcttcgggcccagcatctgctgcgcggacgagctgggctgcttcgtgggcacggctgaggcgctgcgctgccaggaggagaactacctgccgtcgccctgccagtccggccagaaggcgtgcgggagcgggggccgctgcgccgccttcggcgtttgctgcaacgacgagagctgcgtgaccgagcccgagtgccgcgagggctttcaccgccgcgcccgcgccagcgaccggagcaacgccacgcagctggacgggccggccggggccttgctgctgcggctggtgcagctggccggggcgcccgagcccttcgagcccgcccagcccgacgcctac

SEQ ID NO: 1088 - DNA, 423 bp, Homo sapiens
gtgtccttgtcccaggggctgctgctgttgctgctgctgagcatgggcggggcatgggcatccagggagccgcttcggccatggtgccaccccatcaatgccatcctggctgtcgagaaggagggctgcccagtgtgcatcaccgtcaacaccaccatctgtgccggctactgccccaccatgatgcgcgtgctgcaggcggtcctgccgcccctgcctcaggtggtgtgcacctaccgtgatgtgcgcttcgagtccatccggctccctggctgcccgcgtggtgtggaccccgtggtctccttccctgtggctctcagctgtcgctgtggaccctgccgccgcagcacctctgactgtgggggtcccaaagaccaccccttgacctgtgaccacccccaactctcaggcctcctcttcctc

SEQ ID NO: 1089 - DNA, 537 bp, Homo sapiens
atgctgttggaacccggcagaggctgctgtgccctggccatcctgctggcaattgtggacatccagtctggtggatgcattaacatcaccagctcagcttcccaggaaggaacgcgactaaacttaatctgtactgtatggcataagaaagaagaggctgaggggtttgtagtgtttttgtgcaaggacaggtctggagactgttctcctgagaccagtttaaaacagctgagacttaaaagggatcctgggatagatggtgttggtgaaatatcatctcagttgatgttcaccataagccaagtcacaccgttgcacagtgggacctaccagtgttgtgccagaagccagaagtcaggtatccgccttcagggccattttttctccattctattcacagagacagggaactacacagtgacgggattgaaacaaagacaacaccttgagttcagccataatgaaggcactctcagttcaggcttcctacaagaaaaggtctgggtaatgctggtcaccagccttgtggcccttcaa

SEQ ID NO: 1090 - DNA, 255 bp, Homo sapiens
atggtgacgaaggcctttgtcttgttggccatctttgcagaagcctctgcaaaatcgtgtgctccaaataaagcagatgtcattcttgtgttttgctatcccaaaaccatcatcaccaaaatccccgagtgtccctatggatgggaagttcatcagctggccctcggagggctgtgttacaatggggtccacgaaggaggttactaccaatttgtgatcccagatttatcacctaaaaacaagtcctattgtgga

SEQ ID NO: 1091 - DNA, 204 bp, Homo sapiens
atggctatagattgtggtttgacactcctggctgcccactgcagctctggggcaatgtcagtgtttacgttccttcctcaacttggcggcaacagaggaaaggaccttagtagtggttgtggtcaagggtcttttgcttgtatcctgggagctccacaccagagagatgtaggtcagcaattcctcagtgcaatcaccccagga

SEQ ID NO: 1092 - DNA, 255 bp, Homo sapiens
atgcggctgcggctccggcttctggcgctgctgcttctgctgctggcaccgcccgcgcgcgccccgaagccctcggcgcaggacgtgagcctgggcgtggactggctgactcgctatggttacctgccgccaccccaccctgcccaggcccagctgcagagccctgagaagttgcgcgatgccatcaaagtcatgcagaggttcgcggggctgccggagaccggccgcatggacccagggacagtggccaccatg

SEQ ID NO: 1093 - DNA, 867 bp, Homo sapiens
atgacccccatcgtcacagtcctgatctgtctcaggctgagtctgggcccccggacccacgtgcaggcagggaccctccccaagcccacactctgggctgagccaggctctgtgatcacccaggggagtcccgtgaccctctggtgtcaggggatcctggagacccaggagtaccgtctgtatagagaaaagaaaacagcaccctggattacacggatcccacaggagattgtgaagaagggccagttccccatcccatccatcacctgggaacacacagggcggtatcgctgtttctacggtagccacactgcaggctggtcagagcccagtgaccccctggagctggtggtgacaggagcctacatcaaacccaccctctcagctctacccagccctgtggtgacctcaggagggaacgtgaccctccattgtgtctcacaggtggcatttggcagcttcattctgtgtaaggaaggagaagatgaacacccacaatgcctgaactcacagccccgtacccatgggtggtcccgggccatcttctctgtgggccccgtgagcccgagtcgcaggtggtcgtacaggtgctatgcttatgactcgaactctccccatgtgtggtctctacccagtgatctcctggagctcctggtcctaggagcagctgagaccctcagcccaccacaaaacaagtccgattccaaggctggagcagctaacaccctcagcccatcacaaaacaagactgcctcacacccccaggattacacagtggagaatctcatccgcatgggcatagctggcttggtcctggtggtcctcgggattctgctatttgaggctcagcacagccagagaagcctc

SEQ ID NO: 1094 - DNA, 255 bp, Homo sapiens
atgaggctgctcgcctggctgattttcctggctaactggggaggtgccagggctgaaccagggaagttctggcacatcgctgacctgcaccttgaccctgactacaaggtatccaaagaccccttccaggtgtgcccatcagctggatcccagccagtgcccgacgcaggcccctggggtgactacctctgtgattctccctgggccctcatcaactcctccatctatgccatgaaggagattgagccagagcca

SEQ ID NO: 1095 - DNA, 732 bp, Homo sapiens
atggcagcggccgccagccccgcgatccttccgcgcctcgcgattcttccgtacctgctattcgactggtccgggacggggcgggccgacgctcactctctctggtataacttcaccatcattcatttgcccagacatgggcaacagtggtgtgaggtccagagccaggtggatcagaagaattttctctcctatgactgtggcagtgacaaggtcttatctatgggtcacctagaagagcagctgtatgccacagatgcctggggaaaacaactggaaatgctgagagaggtggggcagaggctcagactggaactggctgacactgagctggaggatttcacacccagtggacccctcacgctgcaggtcaggatgtcttgtgagtgtgaagccgatggatacatccgtggatcttggcagttcagcttcgatggacggaagttcctcctctttgactcaaacaacagaaagtggacagtggttcacgctggagccaggcggatgaaagagaagtgggagaaggatagcggactgaccaccttcttcaagatggtctcaatgagagactgcaagagctggcttagggacttcctgatgcacaggaagaagaggctggaacccacagcaccacccaccatggccccaggcttagctcaacccaaagccatagccaccaccctcagtccctggagcttcctcatcatcctctgcttcatcctccctggcatc

SEQ ID NO: 1096 - DNA, 255 bp, Homo sapiens
atgtctccaccactgctgctgctacccttgctgctgctgctgcctctgctgaatgtggagcctgctggggccacactgatccggatccctcttcgtcaagtccaccctggacgcaggaccctgaacctactgaggggatggggaaaaccagcagagctccccaagttgggggccccatcccctggggacaagcctgcctcggtacctctctccaaattcctggatgcccagtattttggggaaattgggctggga

SEQ ID NO: 1097 - DNA, 255 bp, Homo sapiens
atgcccggcggccccagtccccgcagccccgcgcctttgctgcgccccctcctcctgctcctctgcgctctggctcccggcgcccccggacccgcaccaggacgtgcaaccgagggccgggcggcactggacatcgtgcacccggttcgagtcgacgcggggggctccttcctgtcctacgagctgtggccccgcgcactgcgcaagcgggatgtatctgtgcgccgagacgcgcccgccttctacgagctacaa

SEQ ID NO: 1098 - DNA, 255 bp, Homo sapiens
atgacgcctcctccgcccggacgtgccgcccccagcgcaccgcgcgcccgcgtccctggcccgccggctcggttggggcttccgctgcggctgcggctgctgctgctgctctgggcggccgccgcctccgcccagggccacctaaggagcggaccccgcatcttcgccgtctggaaaggccatgtagggcaggaccgggtggactttggccagactgagccgcacacggtgcttttccacgagccaggcagctcc

SEQ ID NO: 1099 - DNA, 255 bp, Homo sapiens
atggtgccagcgctgcgttatttggttggtgcctgcggacgggcccgcgggcttttcgccggtggctcccctggggcgtgcgggttcgcgtctgggaggccaagaccgctgtgtggaggtagccgcagcgccagcaccagctcatttgatatagtcatcgttggtggcggaattgtggggcttgcctctgccagagcactcatcctgcgacatccatcactttctattggtgttctggaaaaggagaaagattta

SEQ ID NO: 1100 - DNA, 255 bp, Homo sapiens
atggtgcgccccctgaacccgcgaccgctgccgcccgtagtcctgatgttgctgctgctgctgccgccgtcgccgctgcctctcgcagccggagacccccttcccacagaaagccgactcatgaacagctgtctccaggccaggaggaagtgccaggctgatcccacctgcagtgctgcctaccaccacctggattcctgcacctctagcataagcaccccactgccctcagaggagccttcggtccctgctgac

SEQ ID NO: 1101 - DNA, 393 bp, Homo sapiens
atgggactctcaggacttctgccaatcctggtaccattcatccttttgggggacatccaggaacctgggcacgctgaaggcatccttggcaagccgtgtcccaaaatcaaagtggaatgcgaagtggaagaaatagaccagtgtaccaaacccagagattgcccagaaaacatgaagtgttgcccgttcagccgtggaaagaaatgtttagacttcagaaagatatatgcagtatgccacaggaggctggcccctgcctggcctccataccacactggtggtacaataaaaaaaactaagatctgctccgaattcatctatggcggtagccaggggaacaataacaacttccaaactgaagctatctgtctggtcacctgcaaaaaataccat

SEQ ID NO: 1102 - DNA, 807 bp, Homo sapiens
atggtccgctgcctggggcctgcgctgctgctgctgctgttactggggtcggcgagctcggtcggagggaaccgatgtgtggacgcggccgaagcctgcacggcggacgcgcggtgccagcgtttgcgctccgagtatgtggcgcagtgcctgggccgggctgcgcaggggggctgtccccgcgcccgctgccgccgggccctgcgccgcttcttcgcccgcgggccgcccgcgctcacccacgcactgctcttctgcccgtgcgcgggccccgcgtgcgccgagcgtcggcgccagaccttcgtgccctcctgcgccttttcggggcccggccccgcgccgccctcctgccttgagcccttaaacttctgcgagcgcagccgggtctgcaggcctcgcctcctggcctttcaggtctcgtgcaccccagcgcccagcgcccccgacggctgcctgctggaccagggcgcccgctgcctgcgcgcctacgcgggcctcgtgggcaccgccgtcacccctaactacgtggacaacgtgagcgcgcgcgtggcgccctggtgcgactgcggagccagcgggaaccggcgtgaggactgcgaagccttccgggggctctttaccaggaaccgctgcttggatggtgccattcaggcctttgccagcgggtggcccccagtcctgctggaccagctgaacccccagggagacccggagcacagcctcctgcaggtgtcctccacaggcagggccctggagagacgctccctgctctccatacttcctgtcctggctctcccggccctgctc

SEQ ID NO: 1103 - DNA, 486 bp, Homo sapiens
atgggccacaaagccagactcccggcagggacacgggtgttccacacaagctgcgttgttggttccctgacgcccttcaggctggggggtgggaaagccgatcccccaagtgcctgcagagcccacctggcgcaggcctcgccgcctcgaggctgctgctcgcacttctgccccttcccccggccaggcccccgttccttgaggccgtaccacaaggtgcgttcatttttccacaccgtgagctgggcttggcagagcctccaccttgtggccagtattcccagtggcccctttgagaggatttcctggagctccctgtctgagcttcccggactgagggcactgggaaggagcctgcggagctggaggtcagcgggtggacgggttgcgctgtcctggctttcggagtgtagagccagaggggatgggacaggtgccctgctgctgggcttggtggtccctgctgcagggaaggggcagctggtg

SEQ ID NO: 1104 - DNA, 255 bp, Homo sapiens
atgtccgcgctgcgacctctcctgcttctgctgctgcctctgtgtcccggtcctggtcccggacccgggagcgaggcaaaggtcacccggagttgtgcagagacccggcaggtgctgggggcccggggatatagcttaaacctaatccctcccgccctgatctcaggtgagcacctccgggtctgtccccaggagtacacctgctgttccagtgagacagagcagaggctgatcagggagactgaggccaccttc

SEQ ID NO: 1105 - DNA, 255 bp, Homo sapiens
atgctggggccctgcatgctgctgctgctgctgctgctgggcctgaggctacagctctccctgggcatcatcccagttgaggaggagaacccggacttctggaaccgcgaggcagccgaggccctgggtgccgccaagaagctgcagcctgcacagacagccgccaagaacctcatcatcttcctgggcgatgggatgggggtgtctacggtgacagctgccaggatcctaaaagggcagaagaaggacaaactg

SEQ ID NO: 1106 - DNA, 255 bp, Homo sapiens
atggggacagccaccaggaggaagccacacctgctgctggtagctgctgtggcccttgtctcctcttcagcttggagttcagccctgggatcccaaaccaccttcgggcctgtctttgaagaccagcccctcagtgtgctattcccagaggagtccacggaggagcaggtgttgctggcatgccgcgcccgggccagccctccagccacctatcggtggaagatgaatggtaccgagatgaagctggagccaggt

SEQ ID NO: 1107 - DNA, 255 bp, Homo sapiens
atggcagtgaagcttgggaccctcctgctggcccttgccctgggcctggcccagccagcctctgcccgccggaagctgctggtgtttctgctggatggttttcgctcagactacatcagtgatgaggcgctggagtcattgcctggtttcaaagagattgtgagcaggggagtaaaagtggattacttgactccagacttccctagtctctcgtatcccaattattataccctaatgactggccgccattgtgaa

SEQ ID NO: 1108 - DNA, 309 bp, Homo sapiens
atgaggcaacgattgctcccgtccgtcaccagccttctccttgtggccctgctgtttccaggatcgtctcaagccagacatgtgaaccactcagccactgaggctctcggagaactcagggaaagagcccctgggcaaggcacaaacgggtttcagctgctacgccacgcagtgaaacgggacctcttaccaccgcgcaccccaccttaccaagtgcacatctctcaccaggaggctcgaggaccctcatttaagatctgcgtgggctttttagggcctagatgggccaggggatgttccactgggaat

SEQ ID NO: 1109 - DNA, 555 bp, Homo sapiens
ggtgagactggaagaaaactttcattgggcccgctgtcccggggtgagtggtcatcagtctggtgcccagcccttggtgtggtgaagctcaggctcttcctggcgccctggtctcctgcacggagctgcgccaaggctccttgtgcaggcttggtgttggcactctggttccctgggggtggagcacatcgacggctcctccctgagcccccgttcttctctgtgtctttcagtgagctcttctacccaggcgggcccctgcccttgagcggcatagatggtgaccccagaggaagacttgcgttgggcccactggctctgggctcagcccctggtgagctgaagctcaggcccttcctggcaccctggtctgctgcactgagctgcgtgagctcttccccacaggtgggccccctggcattgactagcatcgcttcaactggttgggtcaaggctgagcatgactggtgctttgtggtgccgcagaaccctgggattcatgggctttgggtcaatggtgcagcccgcctgctgctgggggtcaccgttcttcga

SEQ ID NO: 1110 - DNA, 849 bp, Homo sapiens
atggcccatgaccttctcttcaggctttttccacttttggccctgggagtccccttacaaagcaaccgccttggccccacatctcgcctgcgctattccaggttcctagatccttctaatgtcattttcctgcgttgggactttgaccttgaggctgaaatcatcagttttgagctccaggtccgtacagctggctgggtgggcttcggtgtcacaaatcgctacaccaacgtgggaagtgatctggttgttggaggagtcttgcctaatggcaatgtctatttctcggatcagcacttggtggaggaagacactctgaaggaggatgggagccaggatgctgagctgctgggcctgacggaagatgctgtctacaccaccatgcacttttccaggcccttccgctcctgcgaccctcatgacctggatattacgagcaacaccgtgagggtgctggccgcctatggcctggatgacactctgaagctgtatcgggagcgtacttttgtcaagtccatctttctgctacaagtcgtccaccctgacgatctggatgtccctgaggacaccatcatccatgacttggagatcactaatttcctcattccagaggatgacaccacgtatgcctgcacctttcttcctctccctattgtgagcgagaagcatcacatttacaagtttgagcctaagttggtctaccacaatgagacaacggtgcatcacatcctggtgtacgcctgtggcaatgctagcgttctccccacaggcatcagcgactgctatggggccgaccctgccttctccctttgctcacaggtcatcgtgggctcggctgtcgggggcaca

SEQ ID NO: 1111 - DNA, 255 bp, Homo sapiens
atggccggcgctcgggccgccgccgccgctgcctcggcggggtcctcggcctcttcaggcaaccagccgcctcaggagctggggcttggggagctgctggaggagttctcccggactcagtaccgggccaaggatggcagcgggaccggcggctctaaggttgagcgcattgagaagagatgtctggagctgtttggccgagactactgtttcagcgtgattccaaacacgaatggggatatctgtggccactat

SEQ ID NO: 1112 - DNA, 603 bp, Homo sapiens
atgctggccggggtagttgttagctgccagtcactccagaccagtggggcgagctgcagctgctgtgcatgcagttggaccgccacatcagcacgcagatccgggagagcccccaggccatgcaccgcaccatgctcaaggacctggctacccagacctacatccttggcaggagctgctgacccactgccagccccagcctgcttttctcctcgccgcaggcccagtatttcagcccctggaaagacatctaaagggacagggtcagggcagcccagggctcctggcttccaggaagtgaacaggctcagggaactggaggaagcgaagcatcaaggccagaggaggccacatgctgaccagcctgatgaggcaagagcctgcccctgccaccgccccgacccctctcctctctgcaagagcctgcctctgccaccgccccgaccccctctcctctcagcaagggatgggcctctctgcctcgcccacccctcagcccctcccagccatctcctcttccctaaggcctctgtctccatagctctggtttccctgggcctcagtcctccccaccctccttcctctgtctccctgtcactaatg

SEQ ID NO: 1113 - DNA, 459 bp, Homo sapiens
caggtcaagtacttgctgctgtcgatattggggcttgcctttctgagtgaggcggcagctcggaaaatccccaaagtaggacatacttttttccaaaagcctgagagttgcccgcctgtgccaggaggtagtatgaagcttgacattggcatcatcaatgaaaaccagcgcgtttccatgtcacgtaacatcgagagccgctccacctccccctggaattacactgtcacttgggaccccaaccggtacccctcggaagttgtacaggcccagtgtaggaacttgggctgcatcaatgctcaaggaaaggaagacatctccatgaattccgttcccatccagcaagagaccctggtcgtccggaggaagcaccaaggctgctctgtttctttccagttggagaaggtgctggtgactgttggctgcacctgcgtcacccctgtcatccaccatgtgcag

SEQ ID NO: 1114 - DNA, 738 bp, Homo sapiens
atgttcctgtttccatcattccctgtccttctcctgtctgtggtgacagcttcctgctccaaaacaaaagcctgtgcagatacccagaagacctgctccatgattacctgtggcatccccgtcaccaatggcaccccaggcagagatgggcgagatagacccaagggggaaaagggagagccaggtcaagggctcagaggtttgcagggccctcctgggaagatggggcccccaggaaacacagggacttctggaattccaggacctaggggccaaaaaggagatcgtggggacaattcagggaactcagactgcttgcctactgtcctgcgctgggctccaaacccagccagcctcactcaccatttgtggtttgccttctccttggggaaaatgtctgggaagaagcttttcgtgaccaatggtgagcggatgcctttctccaaagtgaaggctctgtgtgctgggctccaggccacagtggctgcccccaagaatgccgaggagaataaggccatccaggatgtggccaaagacactgccttcctgggcatcacagatgaggcaactgaaggccagttcatgtacttgacgggcaggaggctgacctacagcaactggaagaaggatgagccaaatgaccacggctcaggggaggactgcgttattctcctgaacaacgggctctggaatggcatctcctgcacctcctccttcattgccatctgtgagtttcct

SEQ ID NO: 1115 - DNA, 219 bp, Homo sapiens
ggattaaagatgatttgcattctttatgagcctctcatggtccagctcacctcaactgtgcgttggtgtggaagatattgcttgttactgactttccttttctttcagattaaaggatcctggtcaaataaaagaggtaaagaaaattacaatccctacagctacggaaatatctttaccaactgctgtgttgccctgtgtgggcccatctcaccaagg

SEQ ID NO: 1116 - DNA, 255 bp, Homo sapiens
atggctcggggccccggcctcgcgccgccaccgctgcggctgccgctgctgctgctggtgctggcggcggtgaccggccacacggccgcgcaggacaactgcacgtgtcccaccaacaagatgaccgtgtgcagccccgacggccccggcggccgctgccagtgccgcgcgctgggctcgggcatggcggtcgactgctccacgctgacctccaagtgtctgctgctcaaggcgcgcatgagcgcccccaagaac

SEQ ID NO: 1117 - DNA, 210 bp, Homo sapiens
atggataattatatcatactttgtgtaataatccaaatactacgttatttattttattgttcaatttgttccagctttggctggtgggagctctttcaggttggctcctatattcctttgatatacccgtatcctttttttgagcactatcttactctctgccactacaagatgctgtacgctcaccttgtatttttccttccccagtgc

SEQ ID NO: 1118 - DNA, 255 bp, Homo sapiens
cgctaccgggacacgcttcgccgcgccatcctgctgctcagcccacagggagcccactccttcatcaacgaggccgtggagaccaacctggcttccaaggacagccactgggtctttgtgaatgaggaaatcagtgacccggagatcctggatctggtccatagtgcccttggaaggatgaccgtggtccggcaaatctttccgtctgcaaaggacaatcagaaatgcacgaggaacaaccaccgcatctcctcc

SEQ ID NO: 1119 - DNA, 255 bp, Homo sapiens
atgatgtggggtgcaggcagccctctggcctggctctcagctggctcaggcaacgtgaatgtaagcagcgtgggcccagcagaggggcccacaggtccagccgcaccactgccctcgcctaaggcctgggatgtggtgctctgcatctcaggcaccctggtgtcctgcgagaatgcgctagtggtggccatcatcgtgggcactcctgccttccgtgcccccatgttcctgctggtgggcagcctggccgtggca

SEQ ID NO: 1120 - DNA, 567 bp, Homo sapiens
atgaaaacaagggcctctgctgtctcagacccaggaggcctgaaactccgtgacagcctggttctagacatgggcttcctggccactccctgggcaccatgcatcaggcagtgtccctatcatataagcacacctgtgagctatacctggcaccaagagggattccttcttctaagacttcctctattggagaaaaacagatcaggacgacctcagcagtcttcaccacctaagaccccaacagctgtcctcaatgctgtggacataacagcattggccactgggaccctgcaatcttcagcatcactgccctcagctgatgtagctgcacctagactatgtagactatgcccaaatcagaacgggaaccacatcatcccacccagtgcacaaatagtcttaacacatttaagaaagttgaaatcatctagtatcttttccaaccacaatggtatgaaactagaaatcaacaggaggaaaactagaaagttcacaaatatagtcatgtgtagtataataacatttccgtcagggactaactgcatatactactgtggtcccattaga

SEQ ID NO: 1121 - DNA, 255 bp, Homo sapiens
atggagtctcgggtcttactgagaacattctgtttgatcttcggtctcggagcagtttgggggcttggtgtggacccttccctacagattgacgtcttaacagagttagaacttggggagtccacgaccggagtgcgtcaggtcccggggctgcataatgggacgaaagcctttctctttcaagatactcccagaagcataaaagcatccactgctacagctgaacagttttttcagaagctgagaaataaacat

SEQ ID NO: 1122 - DNA, 255 bp, Homo sapiens
atgtccgaggagctggcccagggccccaaggagagccccccggcgccgcgtgcgggccccagggaggtgtggaagaagggtggccgcctgctgtcggtgctgctggcggtgaacgtgctgctcctcgcctgcacgctcatcagcggcggagccttcaacaaggtggccgtgtacgacaccgacgtgttcgcgctgctcactgcgatgatgctgctggcaacgctctggatcctcttctacctcctccgaaccgtg

SEQ ID NO: 1123 - DNA, 255 bp, Homo sapiens
atggggtccctgttccggagcgagaccatgtgcctggcgcagctcttcctgcagtcgggcacggcctacgagtgcctcagcgccctgggcgagaaaggcctggtccagttccgagacctcaaccagaacgtaagttctttccaaagaaaatttgttggtgaggtgaagaggtgtgaagagctagagcgaatattggtgtatttggtacaggaaattaatagagctgatattccccttcctgaaggagaggccagc

SEQ ID NO: 1124 - DNA, 678 bp, Homo sapiens
atggcagccatgcgctggcgatggtggcagcggctgttaccttggaggttgctgcaggcccgtggctttccacaaaattctgcacccagcctgggcctaggagcgaggacttattcccagggcgactgctcgtattcgcgcacggcgctgtatgatctgctcggcgtcccctccacagccacgcaggcccaaatcaaggcggcttactaccgtcagtgctttctctaccacccggaccgcaactccgggagcgcggaggccgccgagcgcttcacgcgcatctcccaggcctacgtggtgctgggcagtgccaccctccgtcgcaagtatgatcgcggcctactcagcgacgaggacctgcgcggacctggcgtccggccctccaggacgcccgcacccgaccccggctcgccgcgtaccccgccgcccacctctcggacccacgacggttctcgggcctcccccggcgccaaccgcacgatgttcaactttgacgccttctaccaggcccactacggggaacaactggagcgggaacggcgcctgagggcccggcgggaggcccttcgcaaacggcaggagtatcggtccatgaaaggcctccgctgggaggatacccgagacacggctgccattttcctcatcttttcaatcttcatcatcatcggcttttatatt

SEQ ID NO: 1125 - DNA, 255 bp, Homo sapiens
atggacttttccatctgcatcagtaacatcaccccagcagatgccggcacctactactgtgtgaagttccagaaagggagccctgacgtggagttgaagtctggagcaggcactgagctgtctgtgcgtgccaaaccctctgcccccgtggtatcgggccccgcagcgagggccacacctgaccacacagtgagcttcacctgcgagtctcatggcttctcacccagagacatcagcctgaaatggttcaaaaat

SEQ ID NO: 1126 - DNA, 255 bp, Homo sapiens
ctgcagcaatggatacaaaagttaagcaagaacacagtgacagatgacatcctctgcacttcccccgggcatctcgacaaaaaggaattgaaagccctaaatagtgaaattctctgtccaggtttagtaaataacccatccatgccaacacagactagttaccttatggtcaccactcctgcaacaacaacaaatacggctgatactattttacgatctcttacggacgctgtgccactgtctgttctaatattg

SEQ ID NO: 1127 - DNA, 255 bp, Homo sapiens
atgagccgcgttcgggatgctggctgtgtagcggcggggatagtgataggggctggtgcctggtactgtgtctacaaatacaccagggggagagaccagaccaagaagagaatggccaagcccaaaaaccgggctgtggctgggactggagccagggctagagctgggctaagagccggattcacaatcgaccttgggtcaggattcagtcccccaaccccagtccgtgctgaagcagaggacagggcccaggat

SEQ ID NO: 1128 - DNA, 255 bp, Homo sapiens
gtttgccagggcccacttgaccctgtttcccacctcccgccccccaggtccggaggcgggggcccccggggcgactcgggggcggaccgcggggcggagctgccgcccgtgagtccggccgagccacctgagcccgagccgcgggacaccgtcgctcctgctctccgaatgctgcgcaccgcgatgggcctgaggagctggctcgccgccccatggggcgcgctgccgcctcggccaccgctgctgctgctcctg

SEQ ID NO: 1129 - DNA, 255 bp, Homo sapiens
atgtcgctcacggtcgtcagcatggcgtgcgttgggttcttcttgctgcagggggcctggccactcatgggtggtcaggacaaacccttcctgtctgcccggcccagcactgtggtgcctcgaggaggacacgtggctcttcagtgtcactatcgtcgtgggtttaacaatttcatgctgtacaaagaagacagaagccacgttcccatcttccacggcagaatattccaggagagcttcatcatgggccctgtg

SEQ ID NO: 1130 - DNA, 387 bp, Homo sapiens
atgaagatattctactatgcattaaatcttgaactttataaaacatgtacaaaaattgtacaagataagttccacctggtaatgtctttccctaatacagggttgcgcttgcattggaccctagggatttgcactaaaattatatcaaggtctcagatgagcttagtgcacaagcactatcactttaaatactattatttgctaccacagcaactatatatttccatagcttttggctgggggcgggggacatttttattacaacttgaaattgctttgctggtttcatatttatttgttgtatttaaaaaatacattgttgtaagagtgattttttcaatatattttattcctgggggggatcatgctacactctcaaaagaaaat

SEQ ID NO: 1131 - DNA, 255 bp, Homo sapiens
aatagatcatcattaaaaactattaatgtcactgaaacatcattggagttatcagatttggattataatgttgaatacagtgcttatgtaacagctagcaccagatttggtgatgggaaaacaagaagcaatatcattagctttcaaacaccagagggagcaccaagcgatcctcccaaagatgtttattatgcaaacctcagttcttcatcaataattcttttctggacacctccttcaaaacctaatgggatt

SEQ ID NO: 1132 - DNA, 255 bp, Homo sapiens
atgtctgaactgataccgaaacctttaaatgcgaagaagctgcacgtcaatggcaatagcatcaaggatgtggacgtatcagacttcactgactttgaaggactggatttgcttcatttaggcagcaatcaaattacagtgattaagggagacgtatttcacaatctcactaatttacgcaggctatatctcaatggcaatcaaattgagagactctatcctgaaatattttcaggtcttcataacctgcagtat

SEQ ID NO: 1133 - DNA, 255 bp, Homo sapiens
atgtccatgtcacccacggtcatcatcctggcatgtcttgggttcttcttggaccagagtgtgtgggcacacgtgggtggtcaggacaagcccttctgctctgcctggcccagcgctgtggtgcctcaaggaggacacgtgactcttcggtgtcactatcgtcgtgggtttaacatcttcacgctgtacaagaaagatggggtccctgtccctgagctctacaacagaatattctggaacagtttcctcattagc

SEQ ID NO: 1134 - DNA, 816 bp, Homo sapiens
atggattcatacctgctgatgtggggactgctcacgttcatcatggtgcctggctgccaggcagagctctgtgacgatgacccgccagagatcccacacgccacattcaaagccatggcctacaaggaaggaaccatgttgaactgtgaatgcaagagaggtttccgcagaataaaaagcgggtcactctatatgctctgtacaggaaactctagccactcgtcctgggacaaccaatgtcaatgcacaagctctgccactcggaacacaacgaaacaagtgacacctcaacctgaagaacagaaagaaaggaaaaccacagaaatgcaaagtccaatgcagccagtggaccaagcgagccttccaggtcactgcagggaacctccaccatgggaaaatgaagccacagagagaatttatcatttcgtggtggggcagatggtttattatcagtgcgtccagggatacagggctctacacagaggtcctgctgagagcgtctgcaaaatgacccacgggaagacaaggtggacccagccccagctcatatgcacaggtgaaatggagaccagtcagtttccaggtgaagagaagcctcaggcaagccccgaaggccgtcctgagagtgagacttcctgcctcgtcacaacaacagattttcaaatacagacagaaatggctgcaaccatggagacgtccatatttacaacagagtaccaggtagcagtggccggctgtgttttcctgctgatcagcgtcctcctcctgagtgggctcacctggcagcggagacagaggaagagtagaagaacaatc

SEQ ID NO: 1135 - DNA, 255 bp, Homo sapiens
atgaaccggggagtcccttttaggcacttgcttctggtgctgcaactggcgctcctcccagcagccactcagggaaagaaagtggtgctgggcaaaaaaggggatacagtggaactgacctgtacagcttcccagaagaagagcatacaattccactggaaaaactccaaccagataaagattctgggaaatcagggctccttcttaactaaaggtccatccaagctgaatgatcgcgctgactcaagaagaagc

SEQ ID NO: 1136 - DNA, 669 bp, Homo sapiens
atggcttgccttggatttcagcggcacaaggctcagctgaacctggctaccaggacctggccctgcactctcctgttttttcttctcttcatccctgtcttctgcaaagcaatgcacgtggcccagcctgctgtggtactggccagcagccgaggcatcgccagctttgtgtgtgagtatgcatctccaggcaaagccactgaggtccgggtgacagtgcttcggcaggctgacagccaggtgactgaagtctgtgcggcaacctacatgatggggaatgagttgaccttcctagatgattccatctgcacgggcacctccagtggaaatcaagtgaacctcactatccaaggactgagggccatggacacgggactctacatctgcaaggtggagctcatgtacccaccgccatactacctgggcataggcaacggaacccagatttatgtaattgatccagaaccgtgcccagattctgacttcctcctctggatccttgcagcagttagttcggggttgtttttttatagctttctcctcacagctgtttctttgagcaaaatgctaaagaaaagaagccctcttacaacaggggtctatgtgaaaatgcccccaacagagccagaatgtgaaaagcaatttcagccttattttattcccatcaat

SEQ ID NO: 1137 - DNA, 255 bp, Homo sapiens
atggggaagcccagttcaatggatactaaattcaaggatgacttatttcggaagtacgtgcagttccatgagagcaaagtggataccaccaccagcaggcagcggcctggcagcgatgagtgcctgcgggtggcagcctcaaccctgctcagcctgcacaaggtggatcccttttatcgattccggctgatccagttctatgaggtggtggagagctccttgcgctcgctcagctcctctagcctgcgggctctg

SEQ ID NO: 1138 - DNA, 255 bp, Homo sapiens
atggcgcccgtcgccgtctgggccgcgctggccgtcggactggagctctgggctgcggcgcacgccttgcccgcccaggtggcatttacaccctacgccccggagcccgggagcacatgccggctcagagaatactatgaccagacagctcagatgtgctgcagcaaatgctcgccgggccaacatgcaaaagtcttctgtaccaagacctcggacaccgtgtgtgactcctgtgaggacagcacatacacccag

SEQ ID NO: 1139 - DNA, 255 bp, Homo sapiens
atggcggatggccccaggtgtaagcgcagaaagcaggcgaacccgcggcgcaataacgttacaaattataatactgtggtagaaacaaattcagattcagatgatgaagacaaactgcatattgtggaagaagaaagtgttacagatgcagctgactgtgaaggtgtaccagaggatgacctgccaacagaccagacagtgttaccagggaggagcagtgaaagagaagggaatgctaagaactgctgggaggat

SEQ ID NO: 1140 - DNA, 672 bp, Homo sapiens
gaaagggggagtgcgaatttcttggccctgtcggcaggtgctttctcaaaggccccacagtcctccacttcctggggaggtagctgcagaataaaaccagcagagactccttttctcctaaccgtcccggccaccgctgcctcagcctctgcctcccagcctctttctgagggaaaggacaagatgaagtggaaggcgcttttcaccgcggccatcctgcaggcacagttgccgattacagaggcacagagctttggcctgctggatcccaaactctgctacctgctggatggaatcctcttcatctatggtgtcattctcactgccttgttcctgagagtgaagttcagcaggagcgcagacgcccccgcgtaccagcagggccagaaccagctctataacgagctcaatctaggacgaagagaggagtacgatgttttggacaagagacgtggccgggaccctgagatggggggaaagccgagaaggaagaaccctcaggaaggcctgtacaatgaactgcagaaagataagatggcggaggcctacagtgagattgggatgaaaggcgagcgccggaggggcaaggggcacgatggcctttaccagggtctcagtacagccaccaaggacacctacgacgcccttcacatgcaggccctgccccctcgc

SEQ ID NO: 1141 - DNA, 255 bp, Homo sapiens
atggagtctccctcggcccctccccacagatggtgcatcccctggcagaggctcctgctcacagcctcacttctaaccttctggaacccgcccaccactgccaagctcactattgaatccacgccgttcaatgtcgcagaggggaaggaggtgcttctacttgtccacaatctgccccagcatctttttggctacagctggtacaaaggtgaaagagtggatggcaaccgtcaaattataggatatgtaatagga

SEQ ID NO: 1142 - DNA, 702 bp, Homo sapiens
atggcacagcacggggcgatgggcgcgtttcgggccctgtgcggcctggcgctgctgtgcgcgctcagcctgggtcagcgccccaccgggggtcccgggtgcggccctgggcgcctcctgcttgggacgggaacggacgcgcgctgctgccgggttcacacgacgcgctgctgccgcgattacccgggcgaggagtgctgttccgagtgggactgcatgtgtgtccagcctgaattccactgcggagacccttgctgcacgacctgccggcaccacccttgtcccccaggccagggggtacagtcccaggggaaattcagttttggcttccagtgtatcgactgtgcctcggggaccttctccgggggccacgaaggccactgcaaaccttggacagactgcacccagttcgggtttctcactgtgttccctgggaacaagacccacaacgctgtgtgcgtcccagggtccccgccggcagagccgcttgggtggctgaccgtcgtcctcctggccgtggccgcctgcgtcctcctcctgacctcggcccagcttggactgcacatctggcagctgaggaagacccagctgctgctggaggtgccgccgtcgaccgaagacgccagaagctgccagttccccgaggaagagcggggcgagcgatcggcagaggagaaggggcggctgggagacctgtgggtg

SEQ ID NO: 1143 - DNA, 255 bp, Homo sapiens
atggcgcccccgcaggtcctcgcgttcgggcttctgcttgccgcggcgacggcgacttttgccgcagctcaggaagaatgtgtctgtgaaaactacaagctggccgtaaactgctttgtgaataataatcgtcaatgccagtgtacttcagttggtgcacaaaatactgtcatttgctcaaagctggctgccaaatgtttggtgatgaaggcagaaatgaatggctcaaaacttgggagaagagcaaaacctgaa

SEQ ID NO: 1144 - DNA, 255 bp, Homo sapiens
atgcacggttacgatgcgcccatctacaccaacgtaacctatcccattacggtcaatccgccgtttgttcccacggagaatccgacgggttgttactcgctcacatttaatgttgatgaaagctggctacaggaaggccagacgcgaattatttttgatggcgttaactcggcgtttcatctgtggtgcaacgggcgctgggtcggttacggccaggacagtcgtttgccgtctgaatttgacctgagcgcattt

SEQ ID NO: 1145 - DNA, 792 bp, Homo sapiens
atgattgaacaagatggattgcacgcaggttctccggccgcttgggtggagaggctattcggctatgactgggcacaacagacaatcggctgctctgatgccgccgtgttccggctgtcagcgcaggggcgcccggttctttttgtcaagaccgacctgtccggtgccctgaatgaactgcaggacgaggcagcgcggctatcgtggctggccacgacgggcgttccttgcgcagctgtgctcgacgttgtcactgaagcgggaagggactggctgctattgggcgaagtgccggggcaggatctcctgtcatctcaccttgctcctgccgagaaagtatccatcatggctgatgcaatgcggcggctgcatacgcttgatccggctacctgcccattcgaccaccaagcgaaacatcgcatcgagcgagcacgtactcggatggaagccggtcttgtcgatcaggatgatctggacgaagagcatcaggggctcgcgccagccgaactgttcgccaggctcaaggcgcgcatgcccgacggcgaggatctcgtcgtgacccatggcgatgcctgcttgccgaatatcatggtggaaaatggccgcttttctggattcatcgactgtggccggctgggtgtggcggaccgctatcaggacatagcgttggctacccgtgatattgctgaagagcttggcggcgaatgggctgaccgcttcctcgtgctttacggtatcgccgctcccgattcgcagcgcatcgccttctatcgccttcttgacgagttcttc

SEQ ID NO: 1146 - DNA, 858 bp, Homo sapiens
atgagtattcaacatttccgtgtcgcccttattcccttttttgcggcattttgccttcctgtttttgctcacccagaaacgctggtgaaagtaaaagatgctgaagatcagttgggtgcacgagtgggttacatcgaactggatctcaacagcggtaagatccttgagagttttcgccccgaagaacgttttccaatgatgagcacttttaaagttctgctatgtggcgcggtattatcccgtattgacgccgggcaagagcaactcggtcgccgcatacactattctcagaatgacttggttgagtactcaccagtcacagaaaagcatcttacggatggcatgacagtaagagaattatgcagtgctgccataaccatgagtgataacactgcggccaacttacttctgacaacgatcggaggaccgaaggagctaaccgcttttttgcacaacatgggggatcatgtaactcgccttgatcgttgggaaccggagctgaatgaagccataccaaacgacgagcgtgacaccacgatgcctgtagcaatggcaacaacgttgcgcaaactattaactggcgaactacttactctagcttcccggcaacaattaatagactggatggaggcggataaagttgcaggaccacttctgcgctcggcccttccggctggctggtttattgctgataaatctggagccggtgagcgtgggtctcgcggtatcattgcagcactggggccagatggtaagccctcccgtatcgtagttatctacacgacggggagtcaggcaactatggatgaacgaaatagacagatcgctgagataggtgcctcactgattaagcattgg

SEQ ID NO: 1147 - protein, 504 aa, Homo sapiens
QKNLRLIYQRFVWSGTPETRKRKAKSCICHVCSTHMNRLHSCLSCVFFGCFTEKHIHKHAETKQHHLAVDLYHGVIYCFMCKDYVYDKDIEQIAKETKEKILRLLTSTSTDVSHQQFMTSGFEDKQSTCETKEQEPKLVKPKKKRRKKSVYTVGLRGLINLGNTCFMNCIVQALTHIPLLKDFFLSDKHKCIMTSPSLCLVCEMSSLFHAMYSGSRTPHIPYKLLHLIWIHAEHLAGYRQQDAHEFLIAILDVLHRHSKDDSGGQEANNPNCCNCIIDQIFTGGLQSDVTCQACHSVSTTIDPCWDISLDLPGSCATFDSQNPERADSTVSRDDHIPGIPSLTDCLQWFTRPEHLGSSAKIKCNSCQSYQESTKQLTMKKLPIVACFHLKRFEHVGKQRRKINTFISFPLELDMTPFLASTKESRMKEGQPPTDCVPNENKYSLFAVINHHGTLESGHYTSFIRQQKDQWFSCDDAIITKATIEDLLYSEGYLLFYHKQGLEKD

SEQ ID NO: 1148 - protein, 484 aa, Homo sapiens
MNQYTEIETCVECSAKNLKNISELFYYAQKAVLHPTGPLYCPEEKEMKPACIKALTRIFKISDQDNDGTLNDAELNFFQRICFNTPLAPQALEDVKNVVRKHISDGVADSGLTLKGFLFLHTLFIQRGRHETTWTVLRRFGYDDDLDLTPEYLFPLLKIPPDCTTELNHHAYLFLQSTFDKHDLDRDCALSPDELKDLFKVFPYIPWGPDVNNTVCTNERGWITYQGFLSQWTLTTYLDVQRCLEYLGYLGYSILTEQESQASAVTVTRDKKIDLQKKQTQRNVFRCNVIGVKNCGKSGVLQALLGRNLMRQKKIREDHKSYYAINTVYVYGQEKYLLLHDISESEFLTEAEIICDVVCLVYDVSNPKSFEYCARIFKQHFMDSRIPCLIVAAKSDLHEVKQEYSISPTDFCRKHKMPPPQAFTCNTADAPSKDIFVKLTTMAMYPHVTQADLKSSTFWLRASFGATVFAVLGFAMYKALLKQR

SEQ ID NO: 1149 - protein, 255 aa, Homo sapiens
MLRGTMTAWRGMRPEVTLACLLLATAGCFADLNEVPQVTVQPASTVQKPGGTVILGCVVEPPRMNVTWRLNGKELNGSDDALGVLITHGTLVITALNNHTVGRYQCVARMPAGAVASVPATVTLANLQDFKLDVQHVIEVDEGNTAVIACHLPESHPKAQVRYSVKQEWLEASRGNYLIMPSGNLQIVNASQEDEGMYKCAAYNPVTQEVKTSGSSDRLRVRRSTAEAARIIYPPEAQTIIVTKGQSLILECVAS

SEQ ID NO: 1150 - protein, 255 aa, Homo sapiens
MRGLGLWLLGAMMLPAIAPSRPWALMEQYEVVLPWRLPGPRVRRALPSHLGGQFRPQPCPYLSIRGTYYRPARCPGLIQPVAQLRLSQSSAGRAPACTWGLEMQWSSRRLCRHHQVRQLLEGMGPGGRQLSLEGPGLHPERVSYVLGATGHNFTLHLRKNRDLLGSGYTETYTAANGSEVTEQPRGQDHCFYQGHVEGYPDSAASLSTCAGLRGFFQVGSDLHLIEPLDEGGEGGRHAVYQAEHLLQTAGTCGVS

SEQ ID NO: 1151 - protein, 663 aa, Homo sapiens
AVAVAAASRRQSCYLCDLPRMPWAMIWDFTEPVCRGCVNYEGADRVEFVIETARQLKRAHGCFPEGRSPPGAAASAAAKPPPLSAKDILLQQQQQLGHGGPEAAPRAPQALERYPLAAAAERPPRLGSDFGSSRPAASLAQPPTPQPPPVNGILVPNGFSKLEEPPELNRQSPNPRRGHAVPPTLVPLMNGSATPLPTALGLGGRAAASLAAVSGTAAASLGSAQPTDLGAHKRPASVSSSAAVEHEQREAAAKEKQPPPPAHRGPADSLSTAAGAAELSAEGAGKSRGSGEQDWVNRPKTVRDTLLALHQHGHSGPFESKFKKEPALTAGRLLGFEANGANGSKAGSYKRVIFSGSILNQSAASESRTPEGFKLHVHLKLVYEYFLSVLLERRNSRLLFRVRKRMISFSAPPLMLPFSFYFFVFPVARTARKRKPSPEPEGEVGPPKINGEAQPWLSTSTEGLKIPMTPTSSFVSPPPPTASPHSNRTTPPEAAQNGQSPMAALILVADNAGGSHASKDANQVHSTTRRNSNSPPSPSSMNQRRLGPREVGGQGAGNTGGLEPVHPASLPDSSLATSAPLCCTLCHERLEDTHFVQCPSVPSHKFCFPCSRQSIKQQGASGEVYCPSGEKCPLVGSNVPWAFMQGEIATILAGDVKVKKERD

SEQ ID NO: 1152 - protein, 255 aa, Homo sapiens
MFPTESAWLGKRGANPAPEAVRETVMLLLCLGVPTGRPYNVDTESALLYQGPHNTLFGYSVVLHSHGANRWLLVGAPTANWLANASVINPGAIYRCRIGKNPGQTCEQLQLGSPNGEPCGKTCLEERDNQWLGVTLSRQPGENGSIVTCGHRWKNIFYIKNENKLPTGGCYGVPPDLRTELSKRIAPCYQDYVKKFGENFASCQAGISSFYTKDLIVMGAPGSSYWTGSLFVYNITTNKYKAFLDKQNQVKFGSY

SEQ ID NO: 1153 - protein, 458 aa, Homo sapiens
MVNLRNAVHSFLVHLIGLLVWQCDISVSPVAAIVTDIFNTSDGGRFKFPDGVQNWPALSIVIIIIMTIGGNILVIMAVSMEKKLHNATNYFLMSLAIADMLVGLLVMPLSLLAILYDYVWPLPRYLCPVWISLDVLFSTASIMHLCAISLDRYVAIRNPIEHSRFNSRTKAIMKIAIVWAISIGVSVPIPVIGLRDEEKVFVNNTTCVLNDPNFVLIGSFVAFFIPLTIMVITYCLTIYVLRRQALMLLHGHTEEPPGLSLDFLKCCKRNTAEEENSANPNQDQNARRRKKKERRPRGTMQAINNERKASKVLGIVFFVFLIMWCPFFITNILSVLCEKSCNQKLMEKLLNVFVWIGYVCSGINPLVYTLFNKIYRRAFSNYLRCNYKVEKKPPVRQIPRVAATALSGRELNVNIYRHTNEPVIEKASDNEPGIEMQVENLELPVNPSSVVSERISSV

SEQ ID NO: 1154 - protein, 445 aa, Homo sapiens
  VARIANT 317, 321, 329, 337, 344: Xaa = Any Amino Acid
MAHSFGESYRVGSTSGIHAITVFCSWDYKVTQKRASRLQQDNIRTRLKELLAEWQLRHSPRSVCGRLRQAAVLGLVWLLCLGTALGCAVAVHVFSEFMIQSPEAAGQEAVLLVLPLVVGLLNLGAPYLCRVLAALEPHDSPVLEVYVAICRNLILKLAILGTLCYHWLGRRVGVLQGQCWEDFVGQELYRFLVMDFVLMLLDTLFGELVWRIISEKKLKRRRKPEFDIARNVLELIYGQTLTWLGVLFSPLLPAVQIIKLLLVFYVKKTSLLANCQAPRRPWLASHMSTVFLTLLCFPAFLGAAVFLCYAVWQVKPXEHLXGPFRTLDXHVRRPAGXWVRWRRXGPRVSWLPWVHRYLMENTFFVFLVSALLLAVIYLNIQVVRGQRKVICLLKEQISNEGEDKIFLINKLHSIYERKEREERSRVGTTEEAAAPPALLTDEQDA

SEQ ID NO: 1155 - protein, 470 aa, Homo sapiens
MSRLGALGGARAGLGLLLGTAAGLGFLCLLYSQRWKRTQRHGRSQSLPNSLDYTQTSDPGRHVMLLRAVPGGAGDASVLPSLPREGQEKVLDRLDFVLTSLVALRREVEELRSSLRGLAGEIVGEVRCHMEENQRVARRRRFPFVRERSDSTGSSSVYFTASSGATFTDAESEGGYTTANAESDNERDSDKESEDGEDEVSCETVKMGRKDSLDLEEEAASGASSALEAGGSSGLEDVLPLLQQADELHRGDEQGKREGFQLLLNNKLVYGSRQDFLWRLARAYSDMCELTEEVSEKKSYALDGKEEAEAALEKGDESADCHLWYAVLCGQLAEHESIQRRIQSGFSFKEHVDKAIALQPENPMAHFLLGRWCYQVSHLSWLEKKTATALLESPLSATVEDALQSFLKAEELQPGFSKAGRVYISKCYRELGKNSEARWWMKLALELPDVTKEDLAIQKDLEELEVILRD

SEQ ID NO: 1156 - protein, 338 aa, Homo sapiens
ALTVGLVRQCQTIHGRDRTCIPPRLPPEWVTTLFFIIMGIISLTVTCGLLVASHWRREATKYARWIAFTGRQASLLSCLEELGETRSEIQEKKISIGCFAMATQTSHVFHGQENMFLENHCIRRNTGRDSKKPLKQKNMNGLGQNSDNGLLVTHVNQTQDLLRLQGSETQSSDWEDSEDWLSAHSLKCQKLTLADLISQGTEVLCSDTCNPLGPRDPLIRLCFFREEGTNVVQKICFSTQIIRHFESKLSDTIEVYQERIQWLTENSKKAFGLIKGARVSILIDVSAISSGPQKEEFQKDLMSLIDEQLSHKEKLFVLSFGTNAGSLWPDPMEVSAST

SEQ ID NO: 1157 - protein, 384 aa, Homo sapiens
MPVAEAPQVAGGQGDGGDGEEAEPEGMFKACEDSKRKARGYLRLVPLFVLLALLVLASAGVLLWYFLGYKAEVMVSQVYSGSLRVLNRHFSQDLTRRESSAFRSETAKAQKMLKELITSTRLGTYYNSSSVYSFGEGPLTCFFWFILQIPEHRRLMLSPEVVQALLVEELLSTVNSSAAVPYRAEYEVDPEGLVILGCYRYSYVGQGQVLRLKGPDHLASSCLWHLQGPKDLMLKLRLEWTLAECRDRLAMYDVAGPLEKRLITSVYGCSRQEPVVEVLASGAIMAVVWKKGLHSYYDPFVLSVQPVVFQACEVNLTLDNRLDSQGVLSTPYFPSYYSPQTHCSWHLTVPSLDYGLALWFDAYALRRQKYDLPCTQGQWTIQNR

SEQ ID NO: 1158 - protein, 547 aa, Homo sapiens
  VARIANT 221, 544, 546: Xaa = Any Amino Acid
MAPTLATAHRRRWWMACTALENLLFSAVLLGWGSLLIMLKSEGFYSYLCTEPEPGHEEVSWMNGWLSCQAQDEMLNLAFTVGSFLLSAITLPLGIVMDKYGPRKLRLLGSWGLHSRAFHVPAALSVLIFIALALNGFGGMCMTFTSLTLPNMFGDLRSTFIALMIGSYASSAVTFPGIKLIYDAGVSFIVVLVVWAGCSGLVFLNCFFNWPLEPFPGPEDXGLLTLSRGPRVKIKFSWLGFDHKITGKQFYKQVTTVGRRLSVGSSMRSAKEQVALQEGHKLCLSTVDLEVKCQPDAAVAPSFMHSVFSPILLLSLVTMCVTQLRLIFYMGAMNNILKFLVSGDQKTGLSARRPHDAAPSSTVGLYTSIFGVLQLLCLLTAPVIGYIMDWRLKECEDASEEPEEKDANQGEKKKKKRDRQIQKITNAMRAFAFTNLLLVGFGVTCLIPNLPLQVVHTIVRGFIHSAVGGLYAAVYPSTQFGLTGLQSLISALFALQQPLFLAMMGPLQGDPLWVNVGLLLLSLLGFCLPLYLICYRRQLERQLXAXG

SEQ ID NO: 1159 - protein, 390 aa, Homo sapiens
MGQRLSGGRSCLDVPGRLLPQPPPPPPPVRRKLALLFAMLCVWLYMFLYSCAGSCAAAPGLLLLGSGSRAAHDPPALATAPDGTPPRLPFRAPPATPLASGKEMAEGAASPEEQSPEVPDSPSPISSFFSGSGSKQLPQAIIIGVKKGGTRALLEFLRVHPDVRAVGAEPHFFDRSYDKGLAWYRDLMPRTLDGQITMEKTPSYFVTREAPARISAMSKDTKLIVVVRDPVTRAISDYTQTLSKRPDIPTFESLTFKNRTAGLIDTSWSAIQIGIYAKHLEHWLRHFPIRQMLFVSGERLISDPAGELGRVQDFLGLKRIITDKHFYFNKTKGFPCLKKAEGSSRPHCLGKTKGRTHPEIDREVVRRLREFYRPFNLKFYQMTGHDFGWD

SEQ ID NO: 1160 - protein, 232 aa, Homo sapiens
MGPLALPAWLQPRYRKNAYLFIYYLIQFCGHSWIFTNMTVRFFSFGKDSMVDTFYAIGLVMRLCQSVSLLELLHIYVGIESNHLLPRFLQLTERIIILFVVITSQEEVQEKYVVCVLFVFWNLLDMVRYTYSMLSVIGISYAVLTWLSQTLWMPIYPLCVLAEAFAIYQSLPYFESFGTYSTKLPFDLSIYFPYVLKIYLMMLFIGMYFTYSHLYSERRDILGIFPIKKKKM

SEQ ID NO: 1161 - protein, 288 aa, Homo sapiens
MQRRSRGINTGLILLLSQIFHVGINNIPPVTLATLALNIWFFLNPQKPLYSSCLSVEKCYQQKDWQRLLLSPLHHADDWHLYFNMASMLWKGINLERRLGSRWFAYVITAFSVLTGVVYLLLQFAVAEFMDEPDFKRSCAVGFSGVLFALKVLNNHYCPGGFVNILGFPVPNRFACWVELVAIHLFSPGTSFAGHLAGILVGLMYTQGPLKKIMEACAGGFSSSVGYPGRQYYFNSSGSSGYQDYYPHGRPDHYEEAPRNYDTYTAGLSEEEQLERALQASLWDRGRS

SEQ ID NO: 1162 - protein, 255 aa, Homo sapiens
MTEKMSSFLYIGDIVSLYAEGSVNGFISTLGLVDDRCVVHPEAGDLANPPKKFRDCLFKVCPMNRYSAQKQYWKAKQAKQGNHTEAALLKKLQHAAELEQKQNESENKKLLGEIVKYSNVIQLLHIKSNKYLTVNKRLPALLEKNAMRVSLDAAGNEGSWFYIHPFWKLRSEGDNIVVGDKVVLMPVNAGQPLHASNIELLDNPGCKEVNAVNCNTSWKITLFMKYSSYREDVLKGGDVVRLFHAEQEKFLTCDE

SEQ ID NO: 1163 - protein, 244 aa, Homo sapiens
VFDEVDTDQSGVLSDREIRTLATRIHELPLSLQDLTGLEHMLINCSKMLPADITQLNNIPPTQESYYDPNLPPVTKSLVTNCKPVTDKIHKAYKDKNKYRFEIMGEEEIAFKMIRTNVSHVVGQLDDIRKNPRKFVCLNDNIDHNHKDAQTVKAVLRDFYESMFPIPSQFELPREYRNRFLHMHELQEWRAYRDKLKFWTHCVLATLIMFTIFSFFAEQLIALKRKIFPRRRIHKEASPNRIRV

SEQ ID NO: 1164 - protein, 732 aa, Homo sapiens
LDPSADTWDLFSPLISLWINRFYIYLGFAVSISLWICVQIVIKTQGKNLQEKSVPKAAQDLMTNGYVSLQEKDIFVSGVKIFYGSQTGTAKGFATVLAEAVTSLDLPVAIINLKEYDPDDHLIEEVTSKNVCVFLVATYTDGLPTESAEWFCKWLEEASIDFRFGKTYLKGMRYAVFGLGNSAYASHFNKVGKNVDKWLWMLGAHRVMSRGEGDCDVVKSKHGSIEADFRAWKTKFISQLQALQKGERKKSCGGHCKKGKCESHQHGSEEREEGSHEQDELHHRDTEEEEPFESSSEEEFGGEDHQSLNSIVDVEDLGKIMDHVKKEKREKEQQEEKSGLFRNMGRNEDGERRAMITPALREALTKQGYQLIGSHSGVKLCRWTKSMLRGRGGCYKHTFYGIESHRCMETTPSLACANKCVFCWRHHTNPVGTEWRWKMDQPEMILKEAIENHQNMIKQFKGVPGVKAERFEEGMTVKHCALSLVGEPIMYPEINRFLKLLHQCKISSFLVTNAQFPAEIRNLEPVTQLYVSVDASTKDSLKKIDRPLFKDFWQRFLDSLKALAVKQQRTVYRLTLVKAWNVDELQAYAQLVSLGNPDFIEVKGVTYCGESSASSLTMAHVPWHEEVVQFVHELVDLIPEYEIACEHEHSNCLLIAHRKFKIGGEWWTWIDYNRFQELIQEYEDSGGSKTFSAKDYMARTPHWALFGASERGFDPKDTRHQRKNKSKAISGC

SEQ ID NO: 1165 - protein, 399 aa, Homo sapiens
MAERRRHKKRIQEVGEPSKEEKAVAKYLRFNCPTKSTNMMGHRVDYFIASKAVDCLLDSKWAKAKKGEEALFTTRESVVDYCNRLLKKQFFHRALKVMKMKYDKDIKKEKDKGKAESGKEEDKKSKKENIKDEKTKKEKEKKKDGEKEESKKEETPGTPKKKETKKKFKLEPHDDQVFLDGNEVYVWIYDPVHFKTFVMGLILVIAVIAATLFPLWPAEMRVGVYYLSVGAGCFVASILLLAVARCILFLIIWLITGGRHHFWFLPNLTADVGFIDSFRPLYTHEYKGPKADLKKDEKSETKKQQKSDSEEKSDSEKKEDEEGKVGPGNHGTEGSGGERHSDTDSDRREDDRSQHSSGNGNDFEMITKEELEQQTDGDCEEDEEEENDGETPKSSHEKS

SEQ ID NO: 1166 - protein, 526 aa, Homo sapiens
METEAIDGYITCDNELSPEREHSNMAIDLTSSTPNGQHASPSHMTSTNSVKLEMQSDEECDRKPLSREDEIRGHDEGSSLEEPLIESSEVADNRKVQELQGEGGIRLPNGKLKCDVCGMVCIGPNVLMVHKRSHTGERPFHCNQCGASFTQKGNLLRHIKLHSGEKPFKCPFCSYACRRRDALTGHLRTHSVGKPHKCNYCGRSYKQRSSLEEHKERCHNYLQNVSMEAAGQVMSHHGGNMERVISQKPKQVQSVNFVPFHIFNLILMLLYFFFFFTSFTSHSLPGEKLMRFSYPDIHFDMNLTYEKEAELMQSHMMDQAINNAITYLGAEALHPLMQHPPSTIAEVAPVISSAYSQVYHPNRIERPISRETADSHENNMDGPISLIRPKSRPQEREASPSNSCLDSTDSESSHDDHQSYQGHPALNPKRKQSPAYMKEDVKALDTTKAPKGSLKDIYKVFNGEGEQIRAFKCEHCRVLFLDHVMYTIHMGCHGYRDPLECNICGYRSQDRYEFSSHIVRGEHTFH

SEQ ID NO: 1167 - protein, 859 aa, Homo sapiens
MALVLGSLLLLGLCGNSFSGGQPSSTDAPKAWNYELPATNYETQDSHKAGPIGILFELVHIFLYVVQPRDFPEDTLRKFLQKAYESKIDYDKPETVILGLKIVYYEAGIILCCVLGLLFIILMPLVGYFFCMCRCCNKCGGEMHQRQENGPFLRKCFAISLLVICIIISIGIFYGFVANHQVRTRIKRSRKLADSNFKDLRTLLNETPEQIKYILAQYNTTKDKAFTDLNSINSVLGGGILDRLRPNIIPVLDEIKSMATAIKETKEALENMNSTLKSLHQQSTQLSSSLTSVKTSLRSSLNDPLCLVHPSSETCNSIRLSLSQLNSNPELRQLPPVDAELDNVNNVLRTDLDGLVQQGYQSLNDIPDRVQRQTTTVVAGIKRVLNSIGSDIDNVTQRLPIQDILSAFSVYVNNTESYIHRNLPTLEEYDSYWWLGGLVICSLLTLIVIFYYLGLLCGVCGYDRHATPTTRGCVSNTGGVFLMVGVGLSFLFCWILMIIVVLTFVFGANVEKLICEPYTSKELFRVLDTPYLLNEDWEYYLSGKLFNKSKMKLTFEQVYSDCKKNRGTYGTLHLQNSFNISEHLNINEHTGSISSELESLKVNLNIFLLGAAGRKNLQDFAACGIDRMNYDSYLAQTGKSPAGVNLLSFAYDLEAKANSLPPGNLRNSLKRDAQTIKTIHQQRVLPIEQSLSTLYQSVKILQRTGNGLLERVTRILASLDFAQNFITNNTSSVIIEETKKYGRTIIGYFEHYLQWIEFSISEKVASCKPVATALDTAVDVFLCSYIIDPLNLFWFGIGKATVFLLPALIFAVKLAKYYRRMDSEDVYDDVETIPMKNMENGNNGYHKDHVYGIHNPVMT

SEQ ID NO: 1168 - protein, 207 aa, Homo sapiens
PVYTIGLPPSDLRAGKEETVLVRERHQQESQRFLLLSIITITIILITITVTVIIIITIMDFKEVQRISSSGQSESCSVEAGGWGGVSPSRKCGLLGSQSHRMCSVRAAKAGTEGIIKAMTRGWGTVSPCFELRPLSSARTQVSPTVPVPKELRACWGNSPRNTSLAPSVDPEEGAPRRSGPGPNSEGSSLQNQPLELRDSPTALRTP

SEQ ID NO: 1169 - protein, 255 aa, Homo sapiens
MERRWPLGLGLVLLLCAPLPPGARAKEVTLMDTSKAQGELGWLLDPPKDGWSEQQQILNGTPLYMYQDCPMQGRRDTDHWLRSNWIYRGEEASRVHVELQFTVRDCKSFPGGAGPLGCKETFNLLYMESDQDVGIQLRRPLFQKVTTVAADQSFTIRDLVSGSVKLNVERCSLGRLTRRGLYLAFHNPGACVALVSVRVFYQRCPETLNGLAQFPDTLPGPAGLVEVAGTCLPHARASPRPSGAPRMHCSPDGEW

SEQ ID NO: 1170 - protein, 606 aa, Homo sapiens
MTVVGNPRSWSCQWLPILILLLGTGHGPGVEGVTHYKAGDPVILYVNKVGPYHNPQETYHYYQLPVCCPEKIRHKSLSLGEVLDGDRMAESLYEIRFRENVEKRILCHMQLSSAQVEQLRQAIEELYYFEFVVDDLPIRGFVGYMEESGFLPHSHKIGLWTHLDFHLEFHGDRIIFANVSVRDVKPHSLDGLRPDEFLGLTHTYSVRWSETSVERRSDRRRGDDGGFFPRTLEIHWLSIINSMVLVFLLVGFVAVILMRVLRNDLARYNLDEETTSAGSGDDFDQGDNGWKIIHTDVFRFPPYRGLLCAVLGVGAQFLALGTGIIVMALLGMFNVHRHGAINSAAILLYALTCCISGYVSSHFYRQIGGERWVWNIILTTSLFSVPFFLTWSVVNSVHWANGSTQALPATTILLLLTVWLLVGFPLTVIGGIFGKNNASPFDAPCRTKNIAREIPPQPWYKSTVIHMTVGGFLPFSAISVELYYIFATVWGREQYTLYGILFFVFAILLSVGACISIALTYFQLSGEDYRWWWRSVLSVGSTGLFIFLYSVFYYARRSNMSGAVQTVEFFGYSLLTGYVFFLMLGTISFFSSLKFIRYIYVNLKMD

SEQ ID NO: 1171 - protein, 477 aa, Homo sapiens
RAAALLPSRSPPTPLLWPLLLLLLLETGAQDVRVQVLPEVRGQLGGTVELPCHLLPPVPGLYISLVTWQRPDAPANHQNVAAFHPKMGPSFPSPKPGSERLSFVSAKQSTGQDTEAELQDATLRLHGLTVEDEGNYTCEFATFPKGSVRGMTWLRVIAKPKNQAEAQKVTFSQDPTTVALCISKEGRPPARISWLSSLDWEAKETQVSGTLAGTVTVTSRFTLVPSGRADGVTVTCKVEHESFEEPALIPVTLSVRYPPEVSISGYDDNWYLGRTDATLSCDVRSNPEPTGYDWSTTSGTFPTSAVAQGSQLVIHAVDSLFNTTFVCTVTNAVGMGRAEQVIFVRETPRASPRDVGPLVWGAVGGTLLVLLLLAGGSLAFILLRVRRRRKSPGGAGGGASGDGGFYDPKAQVLGNGDPVFWTPVVPGPMEPDGKDEEEEEEEEKAEKGLMLPPPPALEDDMESQLDGSLISRRAVYV

SEQ ID NO: 1172 - protein, 538 aa, Homo sapiens
MARAAALLPSRSPPTPLLWPLLLLLLLETGAQDVRVQVLPEVRGQLGGTVELPCHLLPPVPGLYISLVTWQRPDAPANHQNVAAFHPKMGPSFPSPKPGSERLSFVSAKQSTGQDTEAELQDATLALHGLTVEDEGNYTCEFATFPKGSVRGMTWLRVIAKPKNQAEAQKVTFSQDPTTVALCISKEGRPPARISWLSSLDWEAKETQVSGTLAGTVTVTSRFTLVPSGRADGVTVTCKVEHESFEEPALIPVTLSVRYPPEVSISGYDDNWYLGRTDATLSCDVRSNPEPTGYDWSTTSGTFPTSAVAQGSQLVIHAVDSLFNTTFVCTVTNAVGMGRAEQVIFVRETPNTAGAGATGGIIGGIIAAIIATAVAATGILICRQQRKEQTLQGAEEDEDLEGPPSYKPPTPKAKLEAQEMPSQLFTLGASEHSPLKTPYFDAGASCTEQEMPRYHELPTLEERSGPLHPGATSLGSPIPVPPGPPAVEDVSLDLEDEEGEEEEEYLDKINPIYDALSYSSPSDSYQGKGFVMSRAMYV

SEQ ID NO: 1173 - protein, 752 aa, Homo sapiens
MALLAMHSWRWAAAAAAFEKRRHSAILIRPLVSVSGSGPQWRPHQLGALGTARAYQIPESLKSITWQRLGKGNSGQFLDAAKALQVWPLIEKRTCWHGHAGGGLHTDPKEGLKDVDTRKIIKAMLSYVWPKDRPDLRARVAISLGFLGGAKAMNIVVPFMFKYAVDSLNQMSGNMLNLSDAPNTVATMATAVLIGYGVSRAGAAFFNEVRNAVFGKVAQNSIRRIAKNVFLHLHNLDLGFHLSRQTGALSKAIDRGTRGISFVLSALVFNLLPIMFEVMLVSGVLYYKCGAQFALVTLGTLGTYTAFTVAVTRWRTRFRIEMNKADNDAGNAAIDSLLNYETVKYFNNERYEAQRYDGFLKTYETASLKSTSTLAMLNFGQSAIFSVGLTAIMVLASQGIVAGTLTVGDLVMVNGLLFQLSLPLNFLGTVYRETRQALIDMNTLFTLLKVDTQIKDKVMASPLQITPQTATVAFDNVHFEYIEGQKVLSGISFEVPAGKKVAIVGGSGSGKSTIVRLLFRFYEPQKGSIYLAGQNIQDVSLESLRRAVGVVPQDAVLFHNTIYYNLLYGNISASPEEVYAVAKLAGLHDAILRMPHGYDTQVGERGLKLSGGEKQRVAIARAILKDPPVILYDEATSSLDSITEETILGAMKDVVKHRTSIFIAHRLSTVVDADEIIVLDQGKVAERGTHHGLLANPHSIYSEMWHTQSSRVQNHDNPKWEAKKENISKEEERKKLQEEIVNSVKGCGNCSC

SEQ ID NO: 1174 - protein, 61 aa, Homo sapiens
MPMDLILVVWFCVCTARTVVGFGMDPDLQMDIVTELDLVNTTLGVAQVSGMHNASKAFLFQ

SEQ ID NO: 1175 - protein, 207 aa, Homo sapiens
MCGRFLRWWLLAEESWHSTPVGRLLFPVLLGFRLVLLAASGPGVYGDEQSEFVCHTQQPGCKAACFDAFHPLSPLRFWVFQVILVAVPSVLYMGFTLYHLGAQLVLEGTAPGLQYHLYGFQMPSSFACGQEPCPYRLTCTFSHPSEKIIFLKAMFGVSGFRLLFTLLEIVLLGLGRLCKPLRNFLGGASSSSHALALSSKRNLQQTL

SEQ ID NO: 1176 - protein, 257 aa, Homo sapiens
MCGRFLRRLLAEESRRSTPVGRLLLPVLLGFRLVLLAASGPGVYGDEQSEFVCHTQQPGCKAACFDAFHPLSPLRFWVFQVILVAVPSALYMGFTLYHVIWHWELSGKGKEEETLIQGREGNTDVPGAGSLRLLWAYVAQLGARLVLEGAALGLQYHLYGFQMPSSFACRREPCLGSITCNLSRPSEKTIFLKTMFGVSGFCLLFTFLELVLLGLGRWWRTWKHKSSSSKYFLTSESTRRHKKATDSLPVVETKEQF

SEQ ID NO: 1177 - protein, 901 aa, Homo sapiens [sequence omitted]

SEQ ID NO: 1178 - protein, 215 aa, Homo sapiens
MPFHPVTAALMYRGIYTVPNLLSEQRPVDIPEDELEEIREAFKVFDRDGNGFISKQELGTAMRSLGYMPNEVELEVIIQRLDMDGDGQVDFEEFVTLLGPKLSTSGIPEKFHGTDFDTVFWKCDMQKLTVDELKRLLYDTFCEHLSMKDIENIIMTEEESHLGTAEECPVDVETCSNQQIRQTCVRKSLICAFAIAFIISVMLIAANQVLRSGMK

SEQ ID NO: 1179 - protein, 295 aa, Homo sapiens
VTEFLLLGLTDHPYQKIVLFFMFLFVYLITLGGNMTLVILIRTDSHLHTPMYFFIGNLSFLDFWYTSVYTPKILASCVSEDKRISLAGCGAQLFFSCVVAYTECYLLAAMAYDRHAAICNPLLYSGTMSTALCTGLVAGSYIGGFLNAIAHTANTFRLHFCGKNIIDHFFCDAPPLVKMSCTNTRVYEKVLLGVVGFTVLSSILAILISYVNILLAILRIHSASGRHKAFSTCASHLISVMLFYGSLLFMYSRPSSTYSLERDKVAALFYTVINPLLNPLIYSLRNKDIKEAFRK

SEQ ID NO: 1180 - protein, 216 aa, Homo sapiens
FVDTCFSSVVSPKMLTDFFVKRKAISFLGCALQQWFFGFFVAADCFLLESMAYDCYVAICNPLLYSVAMSQRLCIQLVVGPYVIGLMNTMTHTTNAFCLPFCGPNVINPFFCDMSPLLSLVCADTRLNKLAVFIVAGAVGVFSGLTILISYIYILMAILRIRSADGRCKTFSTCSSHLTAVFISYGTLFFIYVHPSATFSLDLNKVVSVFYTAVIP

SEQ ID NO: 1181 - protein, 569 aa, Homo sapiens
MKVLLRLICFIALLISSLEADKCKEREEKIILVSSANEIDVRPCPLNPNEHKGTITWYKDDSKTPVSTEQASRIHQHKEKLWFVPAKVEDSGHYYCVVRNSSYCLRIKISAKFVENEPNLCYNAQAIFKQKLPVAGDGGLVCPYMEFFKNENNELPKLQWYKDCKPLLLDNIHFSGVKDRLIVMNVAEKHRGNYTCHASYTYLGKQYPITRVIEFITLEENKPTRPVIVSPANETMEVDLGSQIQLICNVTGQLSDIAYWKWNGSVIDEDDPVLGEDYYSVENPANKRRSTLITVLNISEIESRFYKHPFTCFAKNTHGIDAAYIQLIYPVTNFQKHMIGICVTLTVIIVCSVFIYKIFKIDIVLWYRDSCYDFLPIKASDGKTYDAYILYPKTVGEGSTSDCDIFVFKVLPEVLEKQCGYKLFIYGRDDYVGEDIVEVINENVKKSRRLIIILVRETSGFSWLGGSSEEQIAMYNALVQDGIKVVLLELEKIQDYEKMPESIKFIKQKHGAIRWSGDFTQGPQSAKTRFWKNVRYHMPVQRRSPSSKHQLLSPATKEKLQREAHVPLG

SEQ ID NO: 1182 - protein, 247 aa, Homo sapiens
MVAGSDAGRALGVLSVVCLLHCFGFISCFSQQIYGVVYGNVTFHVPSNVPLKEVLWKKQKDKVAELENSEFRAFSSFKNRVYLDTVSGSLTIYNLTSSDEDEYEMESPNITDTMKFFLYVLESLPSPTLTCALTNGSIEVQCMIPEHYNSHRGLIMYSWDCPMEQCKRNSTSIYFKMENDLPQKIQCTLSNPLFNTTSSIILTTCIPSSGHSRHRYALIPIPLAVITTCIVLYMNGILKCDRKPDRT

SEQ ID NO: 1183 - protein, 911 aa, Homo sapiens
MAAAAASAPQQLSDEELFSQLRRYGLSPGPVTESTRPVYLKKLKKLREEEQQQHRSGGRGNKTRNSNNNNTAAATVAAAGPAAAAAAGMGVRPVSGDLSYLRTPGGLCRISASGPESLLGGPGGASAAPAAGSKVLLGFSSDESDVEASPRDQAGGGGRKDRASLQYRGLKAPPAPLAASEVTNSNSAERRKPHSWWGARRPAGPELQTPPGKDGAVEDEEGEGEDGEERDPETEEPLWASRTVNGSRLVPYSCRENYSDSEEEDDDDVASSRQVLKDDSLSRHRPRRTHSKPLPPLTAKSAGGRLETSVQGGGGLAMNDRAAAAGSLDRSRNLEEAAAAEQGGGCDQVDSSPVPRYRVNAKKLTPLLPPPLTDMDSTLDSSTGSLLKTNNHIGGGAFSVDSPRIYSNSLPPSAAVAASSSLRINHANHTGSNHTYLKNTYNKPKLSEPEEELLQQFKREEVSPTGSFSAHYLSMFLLTAACLFFLILGLTYLGMRGTGVSEDGELSIENPFGETFGKIQESEKTLMMNTLYKLHDRLAQLAGDHECGSSSQRTLSVQEAAAYLKDLGPEYEGIFNTSLQWILENGKDVGIRCVGFGPEEELTNITDVQFLQSTRPLMSFWCRFRRAFVTVTHRLLLLCLGVVMVCVVLRYMKYRWTKEEEETRQMYDMVVKIIDVLRSHNEACQENKDLQPYMPIPHVRDSLIQPHDRKKMKKVWDRAVDFLAANESRVRTETRRIGGADFLVWRWIQPSASCDKILVIPSKVWQGQAFHLDRRNSPPNSLTPCLKIRNMFDPVMEIGDQWHLAIQEAILEKCSDNDGIVHIAVDKNSREGCVYVKCLSPEYAGKAFKALHGSWFDGKLVTVKYLRLDRYHHRFPQALTSNTPLKPSNKHMNSMSHLRLRTGLTNSQGSS

SEQ ID NO: 1184 - protein, 84 aa, Homo sapiens
MVLASFTQNMNIKCCEFVCQVVQKYIINNLVKKRNCEPSWSVYSILCLYVIFSSNRFIIIGFTKRSRKKSEGEIASTALQATSG

SEQ ID NO: 1185 - protein, 469 aa, Homo sapiens
LQNVRIDPSSLSFNMWKEIPIPFYLSVYFFDVMNPSEILKGEKPPVRERGPYVYREFRHKSNITFNNNDTVSFLEYRTFQFQPSKSHGSESDYIVMPNILVLGAAVMMENKPMTLKLIMTLAFTTLGERAFMNRTVGEIMWGYKDPLVNLINKYFPGMFPFKDKFGLFAELNNSDSGLFTVFTGVQNISRIHLVDKWNGLSKVDFWHSDQCNMINGTSGQMWPPFMTPESSLEFYSPEACRSMKLMYKESGVFEGIPTYRFVAPKTLFANGSIYPPNEGFCPCLESGIQNVSTCRFSAPLFLSHPHFLNADPVLAEAVTGLHPNQEAHSLFLDIHPVTGIPMNCSVKLQLSLYMKSVAGIGQTGKIEPVVLPLLWFAESGAMEGETLHTFYTQLVLMPKVMHYAQYVLLALGCVLLLVPVICQIRSQEKCYLFWSSSKKGSKDKEAIQAYSESLMTSAPKGSVLQEAKL

SEQ ID NO: 1186 - protein, 311 aa, Homo sapiens
EMGGNQTSITEFLLLGFPIGPRIQMLLFGLFSLFYIFILLGNGTILGLISLDSRLHTPMYFFLSHLAVVDIACACSTVPQMLVNLLHPAKPISFAGCMTQMFLFLSFAHTECLLLVVMSYDRYVAICHPLRYSTIMTWKVCITLALTSWILGVLLALVHLVLLLPLSFCGPQKLNHFFCEIMAVLKLACADTHINEVVLFAGSAFILVGPLCLVLVSYLHILVAILRIQSGEGRRKAFSTCSSHLCVVGLFFGSAIVMYMAPKSSHSQERRKILSLFYSLFNPILNPLIYSLRNAEVKGALKRVLWKQRSM

SEQ ID NO: 1187 - protein, 298 aa, Homo sapiens
TNISSTTSFTLTGFPEMKGLEHWLAALLLLLYAISFLGNILILFIIKEEQSLHQPMYYFLSLFSVNDLGVSFSTLPTVLAAVVDFDGCLAQMFFIHTFSCMESGVLLAMSYDRFVAIYNLLRYTAILTLPRIICMGLGITLKSVALMAPLPILLRQLPYCHTNVLSHSYCLHSDLIQLPCADTKLNSILGLAIVLANFGLDSLLIVVSYVLILYTVMGIASGEGRWKALNTCVSHICAVLIYYVPMIGVSVMHRAAKHASPIVHTLMSSICLLVPPVLNPIIYSVKTQTIRQGILTLF

SEQ ID NO: 1188 - protein, 314 aa, Homo sapiens
MLGLNGTPFQPATLQLTGIPGIQTGLTWVALIFCILYMISIVGNLSILTLVFWEPALHQPMYYFLSMLALNDLGVSFSTLPTVISTFCFNYNHVAFNACLVQMFFIHTFSFMESGILLAMSLDRFVAICYPLRYVTVLTHNRILAMGLGILTKSFTTLFPFPFVVKRLPFCKGNVLHHSYCLHPDLMKVACGDIHVNNIYGLLVIIFTYGMDSTFILLSYALILRAMLVIISQEQRLKALNTCMSHICAVLAFYVPIIAVSMIHRFWKSAPPVVHVMMSNVYLFVPPMLNPIIYSVKTKEIRKGILKFFHKSQA

SEQ ID NO: 1189 - protein, 312 aa, Homo sapiens
MSSSSSSHPFLLTGFPGLEEAHHWISVFFLFMYISILFGNGTLLLLIKEDHNLHEPMYFFLAMLAATDLGLALTTMPTVLGVLWLDHREIGSAACFSQAYFIHSLSFLESGILLAMAYDRFIAICNPLRYTSVLTNTRVVKIGLGVLMRGFVSVVPPIRPLYFFLYCHSHVLSHAFCLHQDVIKLACADTTFNRLYPAVLVVFIFVLDYLIIFISYVLILKTVLSIASREERAKALITCVSHICCVLVFYVTVIGLSLIHRFGKQVPHIVHLIMSYAYFLFPPLMNPITYSVKTKQIQNAILHLFTTHRIGT

SEQ ID NO: 1190 - protein, 326 aa, Homo sapiens
MSVQYSLSPQFMLLSNITQFSPIFYLTSFPGLEGIKHWIFIPFFFMYMVAISGNCFILIIIKTNPRLHTPMYYLLSLLALTDLGLCVSTLPTTMGIFWFNSQSIYFGACQIQMFCIHSFSFMESSVLLMMSFDRFVAICHPLRYSVIITGQQVVRAGLIVIFRGPVATIPIVLLLKAFPYCGSVVLSHSFCLHQEVIQLACTDTTFNNLYGLMVVVFTVMLDLVLIALSYGLILHTVAGLASQEEQRRAFQTCTAHRCAVLVFFVPMMGLSLVHRFGKHAPPAIHLLMANVYLFVPPMLNPIIYSIKTKEIHRAIIKLLGLKKASK

SEQ ID NO: 1191 - protein, 94 aa, Homo sapiens
MLRHQKLLLFSVTLYLLTTALPPYRRNGQTSESYRFLPPVTSHDLLWVNCFLYIFVSPSKSHILLYLKDKYVLKHLKYSPFGGCSFSWKTKQLR

SEQ ID NO: 1192 - protein, 219 aa, Homo sapiens
MGMSSLKLLKYVLFFFNLLFWICGCCILGFGIYLLIHNNFGVLFHNLPSLTLGNVFVIVGSIIMVVAFLGCMGSIKENKCLLMSFFILLLIILLAEVTLAILLFVYEQKLNEYVAKGLTDSIHRYHSDNSTKAAWDSIQSFLQCCGINGTSDWTSGPPASCPSDRKVEGCYAKARLWFHSNFLYIGIITICVCVIEVLGMSFALTLNCQIDKTSQTIGL

SEQ ID NO: 1193 - protein, 865 aa, Homo sapiens
MADGGGPKDAPSLRSSPGPAPRVPRAVGPSGGGGETPRTAALALRFDKPIKQAFYNTGAVLFVCLCCGAAVLVYFILEAFLRPLLWAVLCGTFLHPFKSSLTRLGRHWLQRLHRAHTPIVLAALLLPLCFVDYGVEALGEQALRRRRLLLLLGAGGPLLYGLYCLGSYLGVQVLLVHAATLICRGLDYFSSLWIWTLVVGYVLTVSFKWNASTERYLRAVSIPVWIILLFHLASLAGSWRIPVFLVIVFLMSVGTLYEKQNGKESSGAELPGQVISMAASTLANLAISITGYESSSEDQPSTQPAEAVDRGESAPTLSTSPSPSSPSPTSPSPTLGRRRPEIGTFLRKKKTSDIYFVSLVWAIVVMQIWLNLWIVQLLPVPIAVWILKKLVIHFGVVDFLEKRYHVWWGIIESFLKERQGALAPWPIVGLGKFLLKVDSKLWHWLNKKMIIWLEKMLDKIISIFIIFLLVIGTLLLALLLTAKVHQESVHMIEVTSNLINETLANHPEWANWLPEAQVVQRALNSAANNVYQYGREWITHKLHKILGDKVNNTAVIEKQVLELWDRLYHSWFVKNVTHSGRHKGQKLHVSRQNSWLGDILDWQDIVSFVHENIETFLSILESLWIVMSRNVSLLFTTVTTLLTILFYSGTALLNFVLSLIIFLTTLFYLLSSSDEYYKPVKWVISLTPLSQPGPSSNIIGQSVEEAIRGVFDASLKMAGFYGLYTWLTHTMFGINIVFIPSALAAILGAVPFLGTYWAAVPAVLDLWLTQGLGCKAILLLIFHLLPTYFVDTAIYSDISGGGHPYLTGLAVAGGAYYLGLEGAIIGPILLCILVVASNIYSAMLVSPTNSVPTPNQTPWPAQPQR

SEQ ID NO: 1194 - protein, 351 aa, Homo sapiens
LVTGAGGFLGQRIIRLLVKEKELKEIRVLDKAFGPELREEFSKLQNKTKLTVLEGDILDEPFLKRACQDVSVIIHTACIIDVFGVTHRESIMNVNVKGTQLLLEACVQASVPVFIYTSSIEVAGPNSYKEIIQNGHEEEPLENTWPAPYPHSKKLAEKAVLAANGWNLKNGGTLYTCALRPMYIYGEGSRFLSASINEALNNNGILSSVGKFSTVNPVYVGNVAWAHILALRALQDPKKAPSIRGQFYYISDDTPHQSYDNLNYTLSKEFGLRLDSRWSFPLSLMYWIGFLLEIVSFLLRPIYTYRPPFNRHIVTLSNSVFTFSYKKAQRDLAYKPLYSWEEAKQKTVEWV

SEQ ID NO: 1195 - protein, 255 aa, Homo sapiens
MAARPLPVSPARALLLALAGALLAPCEARGVSLWNQGRADEVVSASVGSGDLWIPVKSFDSKNHPEVLNIRLQRESKELIINLERNEGLIASSFTETHYLQDGTDVSLARNYTVILARHCYYHGHVRGYSDSAVSLSTCSGLRGLIVFENESYVLEPMKSATNRYKLFPAKKLKSVRGSCGSHHNTPNLAAKNVFPPPSQTWARRHKRETLKATKYVELVIVADNREFQRQGKDLEKVKQRLIEIANHVDKFYRP

SEQ ID NO: 1196 - protein, 404 aa, Homo sapiens
MRFTFPLMAIVLEIAMIVLFGLFVEYETDQTVLEQLNITKPTDMGIFFELYPLFQDVHVMIFVGFGFLMTFLKKYGFSSVGINLLVAALGLQWGTIVQGILQSQGQKFNIGIKNMINADFSAATVLISFGAVLGKTSPTQMLIMTILEIVFFAHNEYLVSEIFKASDIGASMTIHAFGAYFGLAVAGILYRSGLRKGHENEESAYYSDLFAMIGTLFLWMFWPSFNSAIAEPGDKQCRAIVNTYFSLAACVLTAFAFSSLVEHRGKLNMVHIQNATLAGGVAVGTCADMAIHPFGSMIIGSIAGMVSVLGYKFLTPLFTTKLRIHDTCGVHNLHGLPGVVGGLAGIVAVAMGASNTSMAMQAAALGSSIGTAVVGGLMTGLILKLPLWGQPSDQNCYDDSVYWK

SEQ ID NO: 1197 - protein, 277 aa, Homo sapiens
FIAKPCALCIGIEDSGPYQAQPNAILEKVFISITKYPDKKRLEGLSKQLDWNVRKIQCWFRHRRNQDKPPTLTKFCESMWRFTFYLCIFCYGIRFLWSSPWFWDIRQCWHNYPFQPLSSGLYHYYIMELAFYWSLMFSQFTDIKRKDFLIMFVHHLVTIGLISFSYINNMVRVGTLIMCLHDVSDFLLEAAKLANYAKYQRLCDTLFVIFSAVFMVTRLGIYPFWILNTTLFESWEIIGPYASWWLLNGLLLTLQLLHVIWSYLIARIALKALIRGK

SEQ ID NO: 1198 - protein, 296 aa, Homo sapiens
MTDAAVSFAKDFLAGGVAAAISKTAVAPIERVKLLLQVQHASKQITADKQYKGIIDCVVRIPKEQGVLSFWRGNLANVIRYFPTQALNFAFKDKYKQIFLGGVDKRTQFWLYFAGNLASGGAAGATSLCFVYPLDFARTRLAADVGKAGAEREFRGLGDCLVKIYKSDGIKGLYQGFNVSVQGIIIYRAAYFGIYDTAKGMLPDPKNTHIVISWMIAQTVTAVAGLTSYPFDTVRRRMMMQSGRKGTDIMYTGTLDCWRKIARDEGGKAFFKGAWSNVLRGMGGAFVLVLYDEIKK

SEQ ID NO: 1199 - protein, 171 aa, Homo sapiens
MSHGAGLVRTTCSSGSALGPGAGAAQPSASPLEGLLDLSYPRTHAALLKVAQMVTLLIAFICVRSSLWTNYSAYSYFEVVTICDLIMILAFYLVHLFRFYRVLTCISWPLSELLHYLIGTLLLLIASIVAASKSYNQSGLVAGAIFGFMATFLCMASIWLSYKISCVTQST

SEQ ID NO: 1200 - protein, 255 aa, Homo sapiens
MDKLPPSMRKRLYSLPQQVGAKAWIMDEEEDAEEEGAGGRQDPSRRSIRLRPLPSPSPSAAAGGTESRSSALGAADSEGPARGAGKSSTNGDCRRFRGSLASLGSRGGGSGGTGSGSSHGHLHDSAEERRLIAEGDASPGEDRTPPGLAAEPERPGASAQPAASPPPPQQPPQPASASCEQPSVDTAIKVEGGAAAGDQILPEAEVRLGQAGFMQRQFGAMLQPGVNKFSLRMFGSQKAVEREQERVKSAGFWII

SEQ ID NO: 1201 - protein, 266 aa, Homo sapiens
MRVTLATIAWMVSFVSNYSHTANILPDIENEDFIKDCVRIHNKFRSEVKPTASDMLYMTWDPALAQIAKAWASNCQFSHNTRLKPPHKLHPNFTSLGENIWTGSVPIFSVSSAITNWYDEIQDYDFKTRICKKVCGHYTQVVWADSYKVGCAVQFCPKVSGFDALSNGAHFICNYGPGGNYPTWPYKRGATCSACPNNDKCLDNLCVNRQRDQVKRYYSVVYPGWPIYPRNRYTSLFLIVNSVILILSVIITILVQHKYPNLVLLD

SEQ ID NO: 1202 - protein, 386 aa, Homo sapiens
SVPLRKSLCSPTFLWSLLTMGMTQLRIIFYMAAVNKMLEYLVTGGQEHETNEQQQKVAETVGFYSSVFGAMQLLCLLTCPLIGYIMDWRIKDCVDAPTQGTVLGDARDGVATKSIRPRYCKIQKLTNAISAFTLTNLLLVGFGITCLINNLHLQFVTFVLHTIVRGFFHSACGSLYAAVFPSNHFGTLTGLQSLISAVFALLQQPLFMAMVGPLKGEPFWVRARVAPASACLLLMLLALPLAAPSCPMLCTCYSSPPTVSCQANNFSSVPLSLPPSTQRLFLQNNLIRTLRPGTFGSNLLTLWLFSNNLSTIYPGTFRHLQALEELDLGDNRHLRSLEPDTFQGLERLQSLHLYRCQLSSLPGNIFRGLVSLQYLYLQENSLLHLQ

SEQ ID NO: 1203 - protein, 255 aa, Homo sapiens
MERGLPLLCAVLALVLAPAGAFRNDKCGDTIKIESPGYLTSPGYPHSYHPSEKCEWLIQAPDPYQRIMINFNPHFDLEDRDCKYDYVEVFDGENENGHFRGKFCGKIAPPPVVSSGPFLFIKFVSDYETHGAGFSIRYEIFKRGPECSQNYTTPSGVIKSPGFPEKYPNSLECTYIVFVPKMSEIILEFESFDLEPDSNPPGGMFCRYDRLEIWDGFPDVGPHIGRYCGQKTPGRIRSSSGILSMVFYTDSAIAK

SEQ ID NO: 1204 - protein, 96 aa, Homo sapiens
MKLYLFQWALFHFTTVPLFGSWSYTLIFSILLLNYQHKAIYLKDSVYPAIALKSSRKRNPLTCISFCRASLFSFVLCFLPFESDSVLVRKTSWDHS

SEQ ID NO: 1205 - protein, 696 aa, Homo sapiens
VGRDKYEPAAVSEQGDKKGKKGKKDRDMDELKKEVSMDDHKLSLDELHRKYGTDLSRGLTSARAAEILARDGPNALTPPPTTPEWIKFCRQLFGGFSMLLWIGAILCFLAYSIQAATEEEPQNDNLYLGVVLSAVVIITGCFSYYQEAKSSKIMESFKNMVPQQALVIRNGEKMSINAEEVVVGDLVEVKGGDRIPADLRIISANGCKVDNSSLTGESEPQTRSPDFTNENPLETRNIAFFSTNCVEGTARGIVVYTGDRTVMGRIATLASGLEGGQTPIAAEIEHFIHIITGVAVFLGVSFFILSLILEYTWLEAVIFLIGIIVANVPEGLLATVTVCLTLTAKRMARKNCLVKNLEAVETLGSTSTICSDKTGTLTQNRMTVAHMWFDNQIHEADTTENQSGVSFDKTSATWLALSRIAGLCNRAVFQANQENLPILKRAVAGDASESALLKCIELCCGSVKEMRERYAKIVEIPFNSTNKYQLSIHKNPNTSEPQHLLVMKGAPERILDRCSSILLHGKEQPLDEELKDAFQNAYLELGGLGERVLGFCHLFLPDEQFPEGFQFDTDDVNFPIDNLCFVGLISMIDPPRAAVPDAVGKCRSAGIKVIMVTGDHPITAKAIAKGVGIISEGNETVEDIAARLNIPVSQVNPRPMSRGKSWSSPATQPSSSVSWWCSGPTWSSVRPGGIRSSSRG

SEQ ID NO: 1206 - protein, 255 aa, Homo sapiens
MKNIYCLIPKLVNFATLGCLWISVVQCTVLNSCLKSCVTNLGQQLDLGTPHNLSEPCIQGCHFWNSVDQKNCALKCRESCEVGCSSAEGAYEEEVLENADLPTAPFASSIGSHNMTLRWKSANFSGVKYIIQWKYAQLLGSWTYTKTVSRPSYVVKPLHPFTEYIFRVVWIFTAQLQLYSPPSPSYRTHPHGVPETAPLIRNIESSSPDTVEVSWDPPQFPGGPILGYNLRLISKNQKLDAGTQRTSFQFYSTLP

SEQ ID NO: 1207 - protein, 255 aa, Homo sapiens
MPPAAPARLALALGLGLWLGALAGGPGRGCGPCEPPCLCGPAPGAACRVNCSGRGLRTLGPALRIPADATALDVSHNLLRALDVGLLANLSALAELDISNNKISTLEEGIFANLFNLSEINLSGNPFECDCGLAWLPRWAEEQQVRVVQPEAATCAGPGSLAGQPLLGIPLLDSGCGEEYVACLPDNSSGTVAAVSFSAAHEGLLQPEACSAFCFSTGQGLAALSEQGWCLCGAAQPSSASFACLSLCSGPPPPP

SEQ ID NO: 1208 - protein, 194 aa, Homo sapiens
GQIEWAMWANEQALASGLILITGGIVATAGRFTQWYFGAYSIVAGVFVCLLEYPRGKRKKGSTMERWGQKYMTAVVKLFGPFTRNYYVRAVLHLLLSVPAGFLLATILGTACLAIASGIYLLAAVRGEQWTPIEPKPRERPQIGGTIKQPPSNPPPRPPAEARKKPSEEEAAVAAGGPPGGPQVNPIPVTDEVV

SEQ ID NO: 1209 - protein, 270 aa, Homo sapiens
MAGAENWPGQQLELDEDEASCCRWGAQHAGARELAALYSPGKRLQEWCSVILCFSLIAHNLVHLLLLARWEDTPLVILGVVAGALIADFLSGLVHWGADTWGSVELPIVGKAFIRPFREHHIDPTAITRHDFIETNGDNCLVTLLPLLNMAYKFRTHSPEALEQLYPWECFVFCLIIFGTFTNQIHKWSHTYFGLPRWVTLLQDWHVILPRKHHRIHHVSPHETYFCITTGWLNYPLEKIGFWRRLEDLIQGLTGEKPRADDMKWAQKIK

SEQ ID NO: 1210 - protein, 797 aa, Homo sapiens
MAALAYNLGKREINHYFSVRSAKVLALVAVLLLAACHLASRRYRGNDSCEYLLSSGRFLGEKVWQPHSCMMHKYKISEAKNCLVDKHIAFIGDSRIRQLFYSFVKIINPQFKEEGNKHENIPFEDKTASVKVDFLWHPEVNGSMKQCIKVWTEDSIAKPHVIVAGAATWSIKIHNGSSEALSQYKMNITSIAPLLEKLAKTSDVYWVLQDPVYEDLLSENRKMITNEKIDAYNEAAVSILNSSTRNSKSNVKMFSVSKLIAQETIMESLDGLHLPESSRETTAMILMNVYCNKILKPVDGSCCQPRPPVTLIQKLAACFFTLSIIGYLIFYIIHRNAHRKNKPCTDLESGEEKKNIINTPVSSLEILLQSFCKLGLIMAYFYMCDRANLFMKENKFYTHSSFFIPIIYILVLGVFYNENTKETKVLNREQTDEWKGWMQLVILIYHISGASTFLPVYMHIRVLVAAYLFQTGYGHFSYFWIKGDFGIYRVCQVLFRLNFLVVVLCIVMDRPYQFYYFVPLVTVWFMVIYVTLALWPQIIQKKANGNCFWHFGLLLKLGFLLLFICFLAYSQGAFEKIFSLWPLSKCFELKGNVYEWWFRWRLDRYVVFHGMLFAFIYLALQKRQILSEGKGEPLFSNKISNFLLFISVVSFLTYSIWASSCKNKAECNELHPSVSVVQILAFILIRNIPGYARSVYSSFFAWFGKISLELFICQYHIWLAADTRGILVLIPGNPMLNIIVSTFIFVCVAHEISQITNDLAQIIIPKDNSSLLKRLACIAAFFCGLLILSSIQDKSKH

SEQ ID NO: 1211 - protein, 111 aa, Homo sapiens
MPSPGTVCSLLLLGMLWLDLAMAGSSFLSPEHQRVQQRKESKKPPAKLQPRALAGWLRPEDGGQAEGAEDELEVRFNAPFDVGIKLSGVQYQQHSQALGKFLQDILWEEAK

SEQ ID NO: 1212 - protein, 294 aa, Homo sapiens
MQGPAGNASRGLPGGPPSTVASGAGRCESGALMHSFGIFLQGLLGVVAFSTLMLKRFREPKHERRPWRIWFLDTSKQAIGMLFIHFANVYLADLTEEDPCSLYLINFLLDATVGMLLIYVGVRAVSVLVEWQQWESLRFGEYGDPLQCGAWVGQCALYIVIMIFEKSVVFIVLLILQWKKVALLNPIENPDLKLAIVMLIVPFFVNALMFWVVDNFLMRKGKTKAKLEERGANQDSRNGSKVRYRRAASHEESESEILISADDEMEESDVEEDLRRLTPLKPVKKKKHRFGLPV

SEQ ID NO: 1213 - protein, 255 aa, Homo sapiens
MGPERTGAAPLPLLLVLALSQGILNCCLAYNVGLPEAKIFSGPSSEQFGYAVQQFINPKGNWLLVGSPWSGFPENRMGDVYKCPVDLSTATCEKLNLQTSTSIPNVTEMKTNMSLGLILTRNMGTGGFLTCGPLWAQQCGNQYYTTGVCSDISPDFQLSASFSPATQPCPSLIDVVVVCDESNSIYPWDAVKNFLEKFVQGLDIGPTKTQVGLIQYANNPRVVFNLNTYKTKEEMIVATSQTSQYGGDLTNTFGA

SEQ ID NO: 1214 - protein, 255 aa, Homo sapiens
MSDKMSSFLHIGDICSLYAEGSTNGFISTLGLVDDRCVVQPETGDLNNPPKKFRDCLFKLCPMNRYSAQKQFWKAAKPGANSTTDAVLLNKLHHAADLEKKQNETENRKLLGTVIQYGNVIQLLHLKSNKYLTVNKRLPALLEKNAMRVTLDEAGNEGSWFYIQPFYKLRSIGDSVVIGDKVVLNPVNAGQPLHASSHQLVDNPGCNEVNSVNCNTSWKIVLFMKWSDNKDDILKGGDVVRLFHAEQEKFLTCDE

SEQ ID NO: 1215 - protein, 255 aa, Homo sapiens
RFLDYLSDLCVSMNKSIPVTQELICKAVLNPTNADILIETKLVLSRFEFEGVSSTGENALEAGEDEEEVWLFWRDSNKEIRSKSVRELAQDAKEGQKEDRDVLSYYRYQLNLFARMCLDRQYLAINEISGQLDVDLILRCMSDENLPYDLRASFCRLMLHMHVDRDPQEQVTPVKYARLWSEIPSEIAIDDYDSSGASKDEIKERFAQTMEFVEEYLRDVVCQRFPFSDKEKNKLTFEVVNLARNLIYFGFYNFS

SEQ ID NO: 1216 - protein, 124 aa, Homo sapiens
PRRTMLRGKSRLNVEWLGYSPGLLLEHRPLLAGRTPRSHRRNESSLASTLKTLLFFTALMITVPIGLYFTTKSYIFEGALGMSNRDSYFYAAIVAVVAVHVVLALFVYVAWNEGSRQWREGKQD

SEQ ID NO: 1217 - protein, 750 aa, Homo sapiens
MPPATGGGLAESELRPRRGRCGPQAARAAGRDVAAEAVARSPKRPAWGSRRFEAVGWWALLALVTLLSFATRFHRLDEPPHICWDETHFGKMGSYYINRTFFFDVHPPLGKMLIGLAGYLSGYDGTFLFQKPGDKYEHHSYMGMRGFCAFLGSWLVPFAYLTVLDLSKSLSAALLTAALLTFDTGCLTLSQYILLDPILMFFIMAAMLSMVKYNSCADRPFSAPWWFWLSLTGVSLAGALGVKFVGLFIILQVGLNTIADLWYLFGDLSLSLVTVGKHLTARVLCLIVLPLALYTATFAVHFMVLSKSGPGDGFFSSAFQARLSGNNLHNASIPEHLAYGSVITVKNLRMAIGYLHSHRHLYPEGIGARQQQVTTYLHKDYNNLWIIKKHNTNSDPLDPSFPVEFVRHGDIIRLEHKETSRNLHSHYHEAPMTRKHYQVTGYGINGTGDSNDFWRIEVVNRKFGNRIKVLRSRIRFIHLVTGCVLGSSGKVLPKWGWEQLEVTCTPYLKETLNSIWNVEDHINPKLPNISLDVLQPSFPEILLESHMVMIRGNSGLKPKDNEFTSKPWHWPINYQGLRFSGVNDTDFRVYLLGNPVVWWLNLLSIALYLLSGSIIAVAMQRGARLPAEVAGLSQVLLRGGGQVLLGWTLHYFPFFLMGRVLYFHHYFPAMLFSSMLTGILWDTLLRLCAWGLASWPLARGIHVAGILSLLLGTAYSFYLFHPLAYGMVGPLAQDPQSPMAGLRWLDSWDF

SEQ ID NO: 1218 - protein, 283 aa, Homo sapiens
LALGPVELALTSILTLLALGSIAIFLEDAVYLYKNTLCPIKRRTLLWKSSAPTVVSVLCCFGLWIPRSLVLVEMTITSFYAVCFYLLMLVMVEGFGGKEAVLRTLRDTPMMVHTGPCCCCCPCCPRLLLTRKKLQLLMLGPFQYAFLKITLTLVGLFLVPDGIYDPADISEGSTALWINTFLGVSTLLALWTLGIISRQARLHLGEQNMGAKFALFQVLLILTALQPSIFSVLANGGQIACSPPYSSKTRSQVMNCHLLILETFLMTVLTRMYYRRKDHKVGY

SEQ ID NO: 1219 - protein, 541 aa, Homo sapiens
MGSQEVLGHAARLASSGLLLQVLFRLITFVLNAFILRFLSKEIVGVVNVRLTLLYSTTLFLAREAFRRACLSGGTQRDWSQTLNLLWLTVPLGVFWSLFLGWIWLQLLEVPDPNVVPHYATGVVLFGLSAVVELLGEPFWVLAQAHMFVKLKVIAESLSVILKSVLTAFLVLWLPHWGLYIFSLAQLFYTTVLVLCYVIYFTKLLGSPESTKLQTLPVSRITDLLPNITRNGAFINWKEAKLTWSFFKQSFLKQILTEGERYVMTFLNVLNFGDQGVYDIVNNLGSLVARLIFQPIEESFYIFFAKVLERGKDATLQKQEDVAVAAAVLESLLKLALLAGLTITVFGFAYSQLALDIYGGTMLSSGSGPVLLRSYCLYVLLLAINGVTECFTFAAMSKEEVDRYNFVMLALSSSFLVLSYLLTRWCGSVGFILANCFNMGIRITQSLCFIHRYYRRSPHRPLAGLHLSPVLLGTFALSGGVTAVSEVFLCCEQGWPARLAHIAVGAFCLGATLGTAFLTETKLIHFLRTQLGVPRRTDKMT

SEQ ID NO: 1220 - protein, 370 aa, Homo sapiens
MEGVDLLGFLIITLNCNVTMVGKLWFVLTMLLRMLVIVLAGRPVYQDEQERFVCNTLQPGCANVCYDVFSPVSHLRFWLIQGVCVLLPSAVFSVYVLHRGATLAALGPRRCPDPREPASGQRRCPRPFGERGGLQVPDFSAGYIIHLLLRTLLEAAFGALHYFLFGFLAPKKFPCTRPPCTGVVDCYVSRPTEKSLLMLFLWAVSALSFLLGLADLVCSLRRRMRRRPGPPTSPSIRKQSGASGHAEGRRTDEEGGREEEGAPAPPGARAGGEGAGSPRRTSRVSGHTKIPDEDESEVTSSASEKLGRQPRGRPHREAAQDPRGSGSEEQPSAAPSRLAAPPSCSSLQPPDPPASSSGAPHLRARKSEWV

SEQ ID NO: 1221 - protein, 255 aa, Homo sapiens
MAFYSCCWVLLALTWHTSAYGPDQRAQKKGDIILGGLFPIHFGVAAKDQDLKSRPESVECIRYNFRGFRWLQAMIFAIEEINSSPALLPNLTLGYRIFDTCNTVSKALEATLSFVAQNKIDSLNLDEFCNCSEHIPSTIAVVGATGSGVSTAVANLLGLFYIPQVSYASSSRLLSNKNQFKSFLRTIPNDEHQATAMADIIEYFRWNWVGTIAADDDYGRPGIEKFREEAEERDICIDFSELISQYSDEEEIQHV

SEQ ID NO: 1222 - protein, 412 aa, Homo sapiens
MGVWTGRLGGWAQVMFQFLSQGFYCGVGLFTRFLKLLGALLLLALALFLGFLQLGWRFLVGLGDRLGWRDKATWLFSWLDSPALQRCLTLLRDSRPWQRLVRIVQWGWLELPWVKQNINRQGNAPVASGRYCQPEEEVARLLTMAGVPEDELNPFHVLGVEATASDVELKKAYRQLAVMVHPDKNHHPRAEEAFKVLRAAWDIVSNAEKRKEYEMKRMAENELSRSVNEFLSKLQDDLKEAMNTMMCSRCQGKHRRFEMDREPKSARYCAECNRLHPAEEGDFWAESSMLGLKITYFALMDGKVYDITEWAGCQRVGISPDTHRVPYHISFGSRIPGTRGRQRATPDAPPADLQDFLSRIFQVPPGQMPNGNFFAAPQPAPGAAAASKPNSTVPKGEAKPKRRKKVRRPFQR

SEQ ID NO: 1223 - protein, 430 aa, Homo sapiens
RRLRRLAHLVLFCPFSKRLQGRLPGLRVRCIFLAWLGVFAGSWLVYVHYSSYSERCRGHVCQVVICDQYRKGIISGSVCQDLCELHMVEWRTCLSVAPGQQVYSGLWRDKDVTIKCGIEETLDSKARSDAAPRRELVLFDKPTRGTSIKEFREMTLSFLKANLGDLPSLPALVGQVLLMADFNKDNRVSLAEAKSVWALLQRNEFLLLLSLQEKEHASRLLGYCGDLYLTEGVPHGAWHAAALPPLLRPLLPPALQGALQQWLGPAWPWRAKIAIGLLEFVEELFHGSYGTFYMCETTLANVGYTATYDFKMADLQQVAPEATVRRFLQGRRCEHSTDCTYGRDCRAPCDRLMRQCKGDLIQPNLAKVCALLRGYLLPGAPADLREELGTQLRTCTTLSGLASQVEAHHSLVLSHLKTLLWKKISNTKYS

SEQ ID NO: 1224 - protein, 492 aa, Homo sapiens
MVKFPALTHYWPLIRFLVPLGITNIAIDFGEQALNRGIAAVKEDAVEMLASYGLAYSLMKFFTGPMSDFKNVGLVFVNSKRDRTKAVLCMVVAGAIAAVFHTLIAYSDLGYYIINKLHHVDESVGSKTRRAFLYLAAFPFMDAMAWTHAGILLKHKYSFLVGCASISDVIAQVVFVAILLHSHLECREPLLIPILSLYMGALVRCTTLCLGYYKNIHDIIPDRSGPELGGDATIRKMLSFWWPLALILATQRISRPIVNLFVSRDLGGSSAATEAVAILTATYPVGHMPYGWLTEIRAVYPAFDKNNPSNKLVSTSNTVTAAHIKKFTFVCMALSLTLCFVMFWTPNVSEKILIDIIGVDFAFAELCVVPLRIFSFFPVPVTVRAHLTGWLMTLKKTFVLAPSSVLRIIVLIASLVVLPYLGVHGATLGVGSLLAGFVGESTMVAIAACYVYRKQKKKMENESATEGEDSAMTDMPPTEEVTDIVEMREENE

SEQ ID NO: 1225 - protein, 787 aa, Homo sapiens
EILIKVQVYVSGELVPLARASVDVFGNRTLLAAGTTDSEGVATLPLSYRLGTWVLVTAARPGFLTNSVPWRVDKLPLYASVSLYLLPERPATLILYEDLVHILLGSPGARSQPLVQFQRRAARLPVSSTYSQLWASLTPASTQQEMRAFPAFLGTEASSSGNGSWLELMPLTAVSVHLLTGNGTEVPLSGPIHLSLPVPSETRALTVGTSIPAWRFDPKSGLWVRNGTGVIRKEGRQLYWTFVSPQLGYWVAAMASPTAGLVTITSGIQDIGTYHTIFLLTILAALALLVLILLCLLIYYCRRRCLKPRQQHRKLQLSGPSDGNKRDQATSMSQLHLICGGPLEPAPSGDPEAPPPGPLHSAFSSSRDLASSRDDFFRTKPRSASRPAAEPSGARGGESAGLKGARSAEGPGGLEPGLEEHRRGPSGAAAFLHEPPSPPPPFDHYLGHKGAAEGKTPDFLLSQSVDQLARPPSLGQAGQLIFCGSIDHLKDNVYRNVMPTLVIPAHYVRLGGEAGAAGVGDEPAPPEGTAPGPARAFPQPDPQRPQMPGHSGPGGEGGGGGGEGWGAGRAAPVSGSVTIPVLFNESTMAQLNGELQALTEKKLLELGVKPHPRAWFVSLDGRSNSQVRHSYIDLQAGGGARSTDASLDSGVDVHEARPARRRPAREERERAPPAAPPPPPAPPRLALSEDTEPSSSESRTGLCSPEDNSLTPLLDEVAAPEGRAATVPRGRGRSRGDSSRSSASELRRDSLTSPEDELGAEVGDEAGDKKSPWQRREERPLMVFNVK

SEQ ID NO: 1226 - protein, 250 aa, Homo sapiens
LGSRSYSPGPGRWEAAAAAALAHLGGARSRNQGRARGPGLASRSEMSAQRLISNRTSQQSASNSDYTWEYEYYEIGPVSFEGLKAHKYSIVIGFWVGLAVFVIFMFFVLTLLTKTGAPHQDNAESSEKRFRMNSFVSDFGRPLEPDKVFSRQGNEESRSLFHCYINEVERLDRAKACHQTTALDSDVQLQEAIRSSGQPEEELNRLMKFDIPNFVNTDQNYFGEDDLLISEPPIVLETKPLSQTSHKDLD

SEQ ID NO: 1227 - protein, 529 aa, Homo sapiens [sequence omitted]

SEQ ID NO: 1228 - protein, 108 aa, Homo sapiens
MSLTSSSSVRVEWIAAVTIAAGTAAIGYLAYKRFYVKDHRNKAMINLHIQKDNPKIVHAFDMEDLGDKAVYCRCWRSKKFPFCDGAHTKHNEETGDNVGPLIIKKKET

SEQ ID NO: 1229 - protein, 255 aa, Homo sapiens
VILHPSISVRLAAAWCLHCIAVALPSYLTPLLDRCLERLTGHKSSPEAVTGFSFAVAALLGAVKHCPLGIPHGKGKIIMTLAEDLLCSAAQNSRLSAQRTQAGWLLISALMTLGPAVVSHHLARVLLLWKCVFPASPKDLETEKSRGDSFTWQVTLEGRAGALCAIKSFVSHCGDLLTEEVTQRLLPPLPCAVDLLTQLSSILKMYGSPLKTPSVVYRQRLYELLILLPPETYEGNLCAILRELAADLTAPDIQV

SEQ ID NO: 1230 - protein, 747 aa, Homo sapiens
MWGFLKRPVVVTADINLSLVALTGMGLLSRLWRLTYPRAVVFDEVYYGQYISFYMKQIFFLDDSGPPFGHMVLALGGYLGGFDGNFLWNRIGAEYSSNVPVWSLRLLPALAGALSVPMAYQIVLELHFSHCAAMGAALLMLIENALITQSRLMLLESVLIFFNLLAVLSYLKFFNCQKHSPFSLSWWFWLTLTGVACSCAVGIKYMGVFTYVLVLGVAAVHAWHLLGDQTLSNVGADVQCCMRPACMGQMQMSQGVCVFCHLLARAVALLVIPVVLYLLFFYVHLILVFRSGPHDQIMSSAFQASLEGGLARITQGQPLEVAFGSQVTLRNVFGKPVPCWLHSHQDTYPMIYENGRGSSHQQQVTCYPFKDVNNWWIVKDPRRHQLVVSSPPRPVRHGDMVQLVHGMTTRSLNTHDVAAPLSPHSQEVSCYIDYNISMPAQNLWRLEIVNRGSDTDVWKTILSEVRFVHVNTSAVLKLSGAHLPDWGYRQLEIVGEKLSRGYHGSTVWNVEEHRYGASQEQRERERELHSPAQVDVSRNLSFMARFSELQWRMLALRSDDSEHKYSSSPLEWVTLDTNIAYWLHPRTSAQIHLLGNIVIWVSGSLALAIYALLSLWYLLRRRRNVHDLPQDAWLRWVLAGALCAGGWAVNYLPFFLMEKTLFLYHYLPALTFQILLLPVVLQHISDHLCRSQLQRSIFSALVVAWYSSACHVSNTLRPLTYGDKSLSPHELKALRWKDSWDILIRKH

SEQ ID NO: 1231 - protein, 390 aa, Homo sapiens
MISLPGPLVTNLLRFLFLGLSALAPPSRAQLQLHLPANRLQAVEGGEVVLPAWYTLHGEVSSSQPWEVPFVMWFFKQKEKEDQVLSYINGVTTSKPGVSLVYSMPSRNLSLRLEGLQEKDSGPYSCSVNVQDKQGKSRGHSIKTLELNVLVPPAPPSCRLQGVPHVGANVTLSCQSPRSKPAVQYQWDRQLPSFQTFFAPALDVIRGSLSLTNLSSSMAGVYVCKAHNEVGTAQCNVTLEVSTGPGAAVVAGAVVGTLVGLGLLAGLVLLYHRRGKALEEPANDIKEDAIAPRTLPWPKSSDTISKNGTLSSVTSARALRPPHGPPRPGALTPTPSLSSQALPSPRLPTTDGAHPQPISPIPGGVSSSGLSRMGAVPVMVPAQSQAGSLV

SEQ ID NO: 1232 - protein, 426 aa, Homo sapiens
HVPVPHVSVCVCMHLCVWFCVCLCVCLHVCVYLSVSMCLCVSVCVSACLRVPECEHVCVCLHVPVSACVCLCVSVCACVSVYACVCLRVCVCLRVPVSACACVSACACLSACACVCLHVCVCLRVCMCLRVPACLRVPACACACVSACACLSACVCVCLRVCMCLRVPACLRVPVCACMSVCACVCLRVCVCLRVCVCLRVSACACLSACACVCLHVCVCLRVCMCLQTLCMCVSLCVCACVCVCICMCVCICMCVCLCVMCVCLCCICVSICVYVHVCVCMSICVYMCVCVCMCVRVYMCVSLCLYMCVCLYVCMCTCVHVCMCMSICVCMCMCVCVTLLQMQGWVEALAPACMCACTCVCVCVCAHVCVCVHMCVCACMCTSVCARVCVCKCVCTCVCTCASVCACVSVCACKCVCTCLVCTCV

SEQ ID NO: 1233 - protein, 255 aa, Homo sapiens
ILSKLSLPTRAWEPAMKKSFAFDNVGYEGGLDGLGPSSQVATSTVRILGMTCQSCVKSIEDRISNLKGIISMKVSLEQGSATVKYVPSVVCLQQVCHQIGDMGFEASIAEGKAASWPSRSLPAQEAVVKLRVEGMTCQSCVSSIEGKVRKLQGVVRVKVSLSNQEAVITYQPYLIQPEDLRDHVNDMGFEAAIKSKVAPLSLGPIDIERLQSTNPKRPLSSANQNFNNSETLGHQGSHVVTLQLRIDGMHCKSCV

SEQ ID NO: 1234 - protein, 117 aa, Homo sapiens
QDSTAMSWWRNNFWIILAVAIIVVSVGLGLILYCVCKKWEIAKPLKHKQVDEEKMYENVLNESPVQLPPLPPRNWPSLEDSYGVLLCHPGWSAMARSRLTASSASRVHAILLPQPPE

SEQ ID NO: 1235 - protein, 615 aa, Homo sapiens
RRRMGAAPSPTQASSRGGGPGPPAPTRAVSSSSRARGGALSALGPSPARPLTTSPAPAPPPRSRPARQQPDPQCWEKRGGAGGDTKGGAAGPGPGRLRGMDAEYPAFEPPLCSELKHLCRRLREAYRELKEDLTPFKDDRYYRLAPMRLYTLSKRHFVLVFVVFFICFGLTIFVGIRGPKVIQTSAANFSLNNSKKLKPIQILSNPLSTYNQQLWLTCVVELDQSKETSIKTSFPMTVKVDGVAQDGTTMYIHNKVHNRTRTLTCAGKCAEIIVAHLGYLNYTQYTVIVGFEHLKLPIKGMNFTWKTYNPAFSRLEIWFRFFFVVLTFIVTCLFAHSLRKFSMRDWGIEQKWMSVLLPLLLLYNDPFFPLSFLVNSWLPGMLDDLFQSMFLCALLLFWLCVYHGIRVQGERKCLTFYLPKFFIVGLLWLASVTLGIWQTVNELHDPMYQYRVDTGNFQGMKVFFMVVAAVYILYLLFLIVRACSELRHMPYVDLRLKFLTALTFVVLVISIAILYLRFGAQVLQDNFVAELSTHYQNYTEFLSFYGLLNFYLYTLAFVYSPSKNALYESQLKDNPAFSMLNDSDDDVIYGSDYEEMPLQNGQAIRAKYKEESDSD

SEQ ID NO: 1236 - protein, 480 aa, Homo sapiens
MHFWFYYATLLPGFQRTVGIADSNYNWFYGPESQLVFLDKFILKNGAGNWLAQQIRKHRPKDGPMVPSTAQRWSTLHTEYIWYDPQLTPQPPADYGTAKIHTFPNWGVVTYGAGLPNTQTNTFVSFKSGKLGGRAVYDIVHFQPYSWIDGWRSFNPGHEHPDQNSFTFAPNGQVFVSEALYGPKLSHLNNVLVFAPSPSSQCNKPWEGQLGECAQWLKWTGEEVGDAAGEIITASQHGEMVFVSGEAVSAYSSAMRLKSVYRALLLLNSQTLLVVDHIERQEDSPINSVSAFFHNLDIDFKYIPYKFMNRYNGAMMDVWDAHYKMFWFDHHGNSPMASIQEAEQAAEFKKRWTQFVNVTFQMEPTITRIAYVFYGPYINVSSCRFIDSSNPGLQISLNVNNTEHVVSIVTDYHNLKTRFNYLGFGGFASVADQGQITRFGLGTQAIVKPVRHDRIIFPFGFKFNIAVGLILCISLVILTF

SEQ ID NO: 1237 - protein, 799 aa, Homo sapiens
SRPSCHGRLPARPPFYAPAHTLLPSFQRLSVEHCGTQPELPFSPRGERCDPPAGAAGRGGGAREKMATPGSEPQPFVPALSVATLHPLHHPHHHHHHHQHHGGTGAPGGAGGGGGGSGGFNLPLNRGLERALEEAANSGGLNLSARKLKEFPRTAAPGHDLSDTVQADLSKNRLVEVPMELCHFVSLEILNLYHNCIRVIPEAIVNLQMLTYLNLSRNQLSALPACLCGLPLKVLIASNNKLGSLPEEIGQLKQLMELDVSCNEITALPQQIGQLKSLRELNVRRNYLKVLPQELVDLSLVKFDFSCNKVLVIPICFREMKQLQVLLLENNPLQSPPAQICTKGKVHIFKYLSIQACQIKTADSLYLHTMERPHLHQHVEDGKKDSDSGVGSDNGDKRLSATEPSDEDTVSLNVPMSNIMEEEQIIKEDSCHRLSPVKGEFHQEFQPEPSLLGDSTNSGEERDQFTDRADGLHSEFMNYKARFSGSTTAEDCEELLRIEEDVHWQTEGIISSSKDQDMDIAMIEQLREAVDLLQDPNGLSTDITERSVLNLYPMGSAEALELQDSALNGQIQLETSPVCEVQSDLTLQSNGSQYSPNEIRENSPAVSPTTNSTAPFGLKPRSVFLRPQRNLESIDPQFTIRRKMEQMREEKELVEQLRESIEMRLKVSLHEDLGAALMDGVVLCHLVNHIRPRSVASIHVPSPAVPKLSMAKCRRNVENFLEACRKLGVPEADLCSPCDILQLDFRHIRKTVDTLLALGEKAPPPTSALRSRDLIGFCLVHILFIVLVYITYHWNALSA

SEQ ID NO: 1238 - protein, 787 aa, Homo sapiens
MAAARPARGPELPLLGLLLLLLLGDPGRGAASSGNATGPGPRSAGGSARRSAAVTGPPPPLSHCGRAAPCEPLRYNVCLGSVLPYGATSTLLAGDSDSQEEAHGKLVLWSGLRNAPRCWAVIQPLLCAVYMPKCENDRVELPSRTLCQATRGPCAIVERERGWPDFLRCTPDRFPEGCTNEVQNIKFNSSGQCEVPLVRTDNPKSWYEDVEGCGIQCQNPLFTEAEHQDMHSYIAAFGAVTGLCTLFTLATFVADWRNSNRYPAVILFYVNACFFVGSIGWLAQFMDGARREIVCRADGTMRLGEPTSNETLSCVIIFVIVYYALMAGVVWFVVLTYAWHTSFKALGTTYQPLSGKTSYFHLLTWSLPFVLTVAILAVAQVDGDSVSGICFVGYKNYRYRAGFVLAPIGLVLIVGGYFLIRGVMTLFSIKSNHPGLLSEKAASKINETMLRLGIFGFLAFGFVLITFSCHFYDFFNQAEWERSFRDYVLCQANVTIGLPTKQPIPDCEIKNRPSLLVEKINLFAMFGTGIAMSTWVWTKATLLIWRRTWCRLTGQSDDEPKRIKKSKMIAKAFSKRHELLQNPGQELSFSMHTVSHDGPVAGLAFDLNEPSADVSSAWAQHVTKMVARRGAILPQDISVTPVATPVPPEEQANLWLVEAEISPELQKRLGRKKKRRKRKKEVCPLAPPPELHPPAPAPSTIPRLPQLPRQKCLVAAGAWGAGDSCRQGAWTLVSNPFCPEPSPPQDPFLPSAPAPVAWAHGRRQGLGPIHSRTNLMDTELMDADSDF

SEQ ID NO: 1239 - protein, 183 aa, Homo sapiens
MEQRLAEFRAARKRAGLAAQPPAASQGAQTPGEKAEAAATLKAAPGWLKRFLVWKPRPASARAQPGLVQEAAQPQGSTSETPWNTAIPLPSCWDQSFLTNITFLKVLLWLVLLGLFVELEFGLAYFVLSLFYWMYVGTRGPEEKKEGEKSAYSVFNPGCEAIQGTLTAEQLERELQLRPLAGR

SEQ ID NO: 1240 - protein, 239 aa, Homo sapiens
MARGCLCCLKYMMFLFNLIFWLCGCGLLGVGIWLSVSQGNFATFSPSFPSLSAANLVIAIGTIVMVTGFLGCLGAIKENKCLLLSFFIVLLVILLAELILLILFFVYMDKVNENAKKDLKEGLLLYHTENNVGLKNAWNIIQAEMRCCGVTDYTDWYPVLGENTVPDRCCMENSQGCGRNATTPLWRTGCYEKVKMWFDDNKHVLGTVGMCILIMQILGMAFSMTLFQHIHRTGKKYDA

SEQ ID NO: 1241 - protein, 228 aa, Homo sapiens
MPVKGGTKCIKYLLFGFNFIFWLAGIAVLAIGLWLRFDSQTKSIFEQETNNNNSSFYTGVYILIGAGALMMLVGFLGCCGAVQESQCMLGLFFGFLLVIFAIEIAAAIWGYSHKDEVIKEVQEFYKDTYNKLKTKDEPQRETLKAIHYALNCCGLAGGVEQFISDICPKKDVLETFTVKSCPDAIKEVFDNKFHIIGAVGIGIAVVMIFGMIFSMILCCAIRRNREMV

SEQ ID NO: 1242 - protein, 756 aa, Homo sapiens
MLGICRGRRKFLAASLSLLCIPAITWIYLFSGSFEDGKPVSLSPLESQAHSPRYTASSQRERESLEVRMREVEEENRALRRQLSLAQGRAPSHRRGNHSKTYSMEEGTGDSENLRAGIVAGNSSECGQQPVVEKCETIHVAIVCAGYNASRDVVTLVKSVLFHRRNPLHFHLIADSIAEQILATLFQTWMVPAVRVDFYNADELKSEVSWIPNKHYSGIYGLMKLVLTKTLPANLERVIVLDTDITFATDIAELWAVFHKFKGQQVLGLVENQSDWYLGNLWKNHRPWPALGRGYNTGVILLLLDKLRKMKWEQMWRLTAERELMGMLSTSLADQDIFNAVIKQNPFLVYQLPCFWNVQLSDHTRSEQCYRDVSDLKVIHWNSPKKLRVKNKHVEFFRNLYLTFLEYDGNLLRRELFGCPSEADVNSENLQKQLSELDEDDLCYEFRRERFTVHRTHLYFLHYEYEPAADSTDVTLVAQLSMDRLQMLEAICKHWEGPISLALYLSDAEAQQFLRYAQGSEVLMSRHNVGYHIVYKEGQFYPVNLLRNVAMKHISTPYMFLSDIDFLPMYGLYEYLRKSVIQLDLANTKKAMIVPAFETLRYRLSFPKSKAELLSMLDMGTLFTFRYHVWTKGHAPTNFAKWRTATTPYRVEWEADFEPYVVVRRDCPEYDRRFVGFGWNKVAHIMELDVQEYEFIVLPNAYMIHMPHAPSFDITKFRSNKQYRICLKTLKEEFQQDMSRRYGFAALKYLTAENNS

SEQ ID NO: 1243 - protein, 255 aa, Homo sapiens
GFGRLPDSELRAGRGASRRPQQPAAAEVDRAGTEGQTDVAELESCEGQPGKVEQMSTHRSRLLTAAPLSMEQRRPWPRALEVDSRSVVLLSVVWVLLAPPAAGMPQFSTFHSENRDWTFNHLTVHQGTGAVYVGAINRVYKLTGNLTIQVAHKTGPEEDNKSCYPPLIVQPCSEVLTLTNNVNKLLIIDYSENRLLACGSLYQGVCKLLRLDDLFILVEPSHKKEHYLSSVNKTGTMYGVIVRSEGEDGKLFIGT

SEQ ID NO: 1244 - protein, 627 aa, Homo sapiens
MGSCARLLLLWGCTVVAAGLSGVAGVSSRCEKACNPRMGNLALGRKLWADTTCGQNATELYCFYSENTDLTCRQPKCDKCNAAYPHLAHLPSAMADSSFRFPRTWWQSAEDVHREKIQLDLEAEFYFTHLIVMFKSPRPAAMVLDRSQDFGKTWKPYKYFATNCSATFGLEDDVVKKGAICTSKYSSPFPCTGGEVIFKALSPPYDTENPYSAKVQEQLKITNLRVQLLKRQSCPCQRNDLNEEPQHFTHYAIYDFIVKGSCFCNGHADQCIPVHGFRPVKAPGTFHMVHGKCMCKHNTAGSHCQHCAPLYNDRPWEAADGKTGAPNECRTCKCNGHADTCHFDVNVWEASGNRSGGVCDDCQHNTEGQYCQRCKPGFYRDLRRPFSAPDACKPCSCHPVGSAVLPANSVTFCDPSNGDCPCKPGVAGRRCDRCMVGYWGFGDYGCRPCDCAGSCDPITGDCISSHTDIDWYHEVPDFRPVHNKSEPWEWEDAQGFSALLHSGKCECKEQTLGNAKAFCGMKYSYVLKIKILSAHDKGTHVEVNVKIKKVLKSTKLKIFRGKRTLYPESWTDRGCTCPILNPGLEYLVAGHEDIRTGKLIVNMKSFVQHWKPSLGRKVMDILKRECK

SEQ ID NO: 1245 - protein, 255 aa, Homo sapiens
FMSMFQILTQEGWVDVMDQTLNAVGHMWAPVVAIYFILYHLFATLILLSLFVAVILDNLELDEDLKKLKQLKQSEANADTKEKLPLRLRIFEKFPNRPQMVKISKLPSDFTVPKIRESFMKQFIDRQQQDTCCLLRSLPTTSSSSCDHSKRSAIEDNKYIDQKLRKSVFSIRARNLLEKETAVTKILRACTRQRMLSGSFEGQPAKERSILSVQHHIRQERRSLRHGSNSQRISRGKSLETLTQDHSNTVRYRNA

SEQ ID NO: 1246 - protein, 540 aa, Homo sapiens [sequence omitted]

SEQ ID NO: 1247 - protein, 458 aa, Homo sapiens
  VARIANT 319: Xaa = Any Amino Acid
MEGSASPPEKPRARPAAAVLCRGPVEPLVFLANFALVLQGPLTTQYLWHRFSADLGYNGTRQRGGCSNRSADPTMQEVETLTSHWTLYMNVGGFLVGLFSSTLLGAWSDSVGRRPLLVLASLGLLLQALVSVFVVQLQLHVGYFVLGRILCALLGDFGGLLAASFASVADVSSSRSRTFRMALLEASIGVAGMLASLLGGHWLRAQGYANPFWLALALLIAMTLYAAFCFGETLKEPKSTRLFTFRHHRSIVQLYVAPAPEKSRKHLALYSLAIFVVITVHFGAQDILTLYELSTPLCWDSKLIGYGSAAQHLPYLTSXLALKLLQYCLADAWVAEIGLAFNILGMVVFAFATITPLMFTGYGLLFLSLVITPVIRAKLSKLVRETEQGALFSAVACVNSLAMLTASGFNSLYPATLNFMKGFPFLLGAGLLLIPAVLIGMLEKADPHLEFQQFPQSP

SEQ ID NO: 1248 - protein, 396 aa, Homo sapiens
YSSTSTRREHVKVKTSSQPGFLERLSETSGGMFVGLMAFLLSFYLIFTNEGRALKTATSLAEGLSLVVSPDSIHSVAPENEGRLVHIIGALRTSKLLSDPNYGVHLPAVKLRRHVEMYQWVETEESREYTEDGQVKKETRYSYNTEWRSEIINSKNFDREIGHKNPSAMAVESFMATAPFVQIGRFFLSSGLIDKVDNFKSLSLSKLEDPHVDIIRRGDFFYHSENPKYPEVGDLRVSFSYAGLSGDDPDLGPAHVVTVIARQRGDQLVPFSTKSGDTLLLLHHGDFSAEEVFHRELRSNSMKTWGLRAAGWMAMFMGLNLMTRILYTLVDWFPVFRDLVNIGLKAFAFCVATSLTLLTVAAGWLFYRPLWALLIAGLALVPILVARTRVPAKKLE

SEQ ID NO: 1249 - protein, 313 aa, Homo sapiens
MNWENESSPKEFILLGFSDRAWLQMPLFVVLLISYTITIFGNVSIMMVCILDPKLHTPMYFFLTNLSILDLCYTTTTVPHMLVNIGCNKKTISYAGCVAHLIIFLALGATECLLLAVMSFDRYVAVCRPLHYVVIMNYWFCLRMAAFSWLIGFGNSVLQSSLTLNMPRCGHQEVDHFFCEVPALLKLSCADTKPIEAELFFFSVLILLIPVTLILISYGFIAQAVLKIRSAEGRQKAFGTCGSHMIVVSLFYGTAIYMYLQPPSSTSKDWGKMVSLFYGIITSMLNSLIYSLRNKDMKEAFKRLMPRIFFCKK

SEQ ID NO: 1250 - protein, 290 aa, Homo sapiens
ILTTTGLFFVFDCPYLARKLTLAIPIIAAILFFFVMSCLLQTSFTDPGILPRATVCEAAALEKQIDNTGSSTYRPPPRTREVLINGQMVKLKYCFTCKMFRPPRTSHCSVCDNCVERFDHHCPWVGNCVGRRNYRFFYAFILSLSFLTAFIFACVVTHLTLRVAGRLPTLHPLKSLTALTVLELVICFFSIWSILGLSGFHTYLVASNLTTNEDIKGSWSSKRGGEASVNPYSHKSIITNCCAVLCGPLPPSLIDRRGFVQSDTVLPSPIRSDEPACRAKPDASMVGGHP

SEQ ID NO: 1251 - protein, 240 aa, Homo sapiens
MEPRALVTALSLGLSLCSLGLLVTAIFTDHWYETDPRRHKESCERSRAGADPPDQKNRLMPLSHLPLRDSPPLGRRLLPGGPGRADPESWRSLLGLGGLDAECGRPLFATYSGLWRKCYFLGIDRDIDTLILKGIAQRCTAIKYHFSQPIRLRNIPFNLTKTIQQDEWHLLHLRRITAGFLGMAVAVLLCGCIVATVSFFWEESLTQHVAGLLFLMTGIFCTISLCTYAASISYDLNRLP

SEQ ID NO: 1252 - protein, 265 aa, Homo sapiens
MKPAMETAAEENTEQSQERKGCFECCIKCLGGVPYASLVATILCFSGVALFCGCGHVALAGTVAILEQHFSTNASDHALLSEVIQLMQYVIYGIASFFFLYGIILLAEGFYTTSAVKELHGEFKTTACGRCISGMFVFLTYVLGVAWLGVFGFSAVPVFMFYNIWSTCEVIKSPQTNGTTGVEQICVDIRQYGIIPWNAFPGKICGSALENICNTNEFYMSYHLFIVACAGAGATVIALLIYMMATTYNYAVLKFKSREDCCTKF

SEQ ID NO: 1253 - protein, 722 aa, Homo sapiens
GLKNKPKKMGHIKPDLIDVDLIRGSTFAKAKPEIPWTSLTRKGLVRVVFFPLFSNWWIQVTSLRIFVWLLLLYFMQVIAIVLYLMMPIVNISEVLGPLCLMLLMGTVHCQIVSTQITRPSGNNGNRRRRKLRKTVNGDGSRENGNNSSDKVRGIETLESVPIIGGFWETIFGNRIKRVKLISNKGTETDNDPSCVHPIIKRRQCRPEIRMWQTREKAKFSDGEKCRREAFRRLGNGVSDDLSSEEDGEARTQMILLRRSVEGASSDNGCEVKNRKSILSRHLNSQVKKTTTRWCHIVRDSDSLAESEFESAAFSQGSRSGVSGGSRSLNMSRRDSESTRHDSETEDMLWDDLLHGPECRSSVTSDSEGAHVNTLHSGTKRDPKEDVFQQNHLFWLQNSSPSSDRVSAIIWEGNECKKMDMSVLEISGIIMSRVNAYQQGVGYQMLGNVVTIGLAFFPFLHRLFREKSLDQLKSISAEEILTLFCGAPPVTPIIVLSIINFFERLCLTWMFFFMMCVAERTYKQRFLFAKLFSHITSARKARKYEIPHFRLKKVENIKIWLSLRSYLKRRGPQRSVDVVVSSVFLLTLSIAFICCAQVLQGHKTFLNDAYNWEFLIWETALLLFLLRLASLGSETNKKYSNVSILLTEQINLYLKMEKKPNKKEQLTLVNNVLKLSTKLLKELDTPFRLYGLTMNPLIYNITRVVILSAVSGVISDLLGFNIR

SEQ ID NO: 1254 - protein, 226 aa, Homo sapiens
METVVIVAIGVLATIFLASFAALVLVCRQRYCRPRDLLQRYDSKPIVDLIGAMETQSEPSELELDDVVITNPHIEAILENEDWIEDASGLMSHCIAILKICHTLTEKLVAMTMGSGAKMKTSASVSDIIVVAKRISPRVDDVVKSMYPPLDPKLLDARTTALLLSVSHLVLVTRNACHLTGGLDWIDQSLSAAEEHLEVLREAALASEPDKGLPGPEGFLQEQSAI

SEQ ID NO: 1255 - protein, 375 aa, Homo sapiens
MGLLVFVRNLLLALCLFLVLGFLYYSAWKLHLLQWEEDSNSVVLSFDSAGQTLGSEYDRLGFLLNLDSKLPAELATKYANFSEGACKPGYASALMTAIFPRFSKPAPMFLDDSFRKWARIREFVPPFGIKGQDNLIKAILSVTKEYRLTPALDSLRCRRCIIVGNGGVLANKSLGSRIDDYDIVVRLNSAPVKGFEKDVGSKTTLRITYPEGAMQRPEQYERDSLFVLAGFKWQDFKWLKYIVYKERVSASDGFWKSVATRVPKEPPEIRILNPYFIQEAAFTLIGLPFNNGLMGRGNIPTLGSVAVTMALHGCDEVAVAGFGYDMSTPNAPLHYYETVRMAAIKESWTHNIQREKEFLRKLVKARVITDLSSGI

SEQ ID NO: 1256 - protein, 282 aa, Homo sapiens
MRPVSWGAQISWKQADPFASLKKVGKDSTVLLICITVFLSYLPEAGQYSSFFLYLRQVSSFGSVKIAAFIAMVGILSIVAQTAFLSILMRSLGNKNTVLLGLGFQMLQLAWYGFGSQAWMMWAAGTVAAMSSITFPAISALVSRNAESDQQGVAQGIITGIRGLCNGLGPALYGFIFYMFHVELTELGPKLNSNNVPLQGAVIPGPPFLFGACIVLMSFLVALFIPEYSKASGVQKHSNSSSGSLTNTPERGSDEDIEPLLQDSSIWELSSFEEPGNQCTEL

SEQ ID NO: 1257 - protein, 613 aa, Homo sapiens
AMAAAGRLPSSWALFSPLLAGLALLGVGPVPARALHNVTAELFGAEAWGTLAAFGDLNSDKQTDLFVLRERNDLIVFLADQNAPYFKPKVKVSFKNHSALITSVVPGDYDGDSQMDVLLTYLPKNYAKSELGAVIFWGQNQTLDPNNMTILNRTFQDEPLIMDFNGDLIPDIFGITNESNQPQILLGGNLSWHPALTTTSKMRIPHSHAFIDLTEDFTADLFLTTLNATTSTFQFEIWENLDGNFSVSTILEKPQNMMVVGQSAFADFDGDGHMDHLLPGCEDKNCQKSTIYLVRSGMKQWVPVLQDFSNKGTLWGFVPFVDEQQPTEIPIPITLHIGDYNMDGYPDALVILKNTSGSNQQAFLLENVPCNNASCEEARRMFKVYWELTDLNQIKDAMVATFFDIYEDGILDIVVLSKGYTKNDFAIHTLKNNFEADAYFVKVIVLSGLCSNDCPRKITPFGVNQPGPYIMYTTVDANGYLKNGSAGQLSQSAHLALQLPYNVLGLGRSANFLDHLYVGIPRPSGEKSIRKQEWTAIIPNSQLIVIPYPHNVPRSWSAKLYLTPSNIVLLTAIALIGVCVFILAIIGILHWQEKKADDREKRQEAHRFHFDAM

SEQ ID NO: 1258 - protein, 255 aa, Homo sapiens
PVTIDQILEMVNGQRGLVLYYSLAAGYLYSWLLAPGAGIVKFHEHYLGENTVENSSDFQASSSVTLPTATGSALEQHIASVREALGVESHYSRACASSETESEAGDIMDQQFEEMNNKLNSVTDPTGFLRMVRRNNLFNRSCQSMTSLFSNTVSPTQDGTSSLPRRQSSFAKPPLRALYDLLIAPMEGGLMHSSGPVGRHRQLILVLEGELYLIPFALLKGSSSNEYLYERFGLLAVPSIRSLSVQSKSHLRKNP

SEQ ID NO: 1259 - protein, 101 aa, Homo sapiens
MNLERVSNEEKLNLCRKYYLGGFAFLPFLWLVNIFWFFREAFLVPAYTEQSQIKGYVWRSAVGFLFWVIVLTSWITIFQIYRPRWGALGDYLSFTIPLGTP

SEQ ID NO: 1260 - protein, 634 aa, Homo sapiens
MAPKKKIVKKNKGDINEMTIIVEDSPLNKLNALNGLLEGGNGLSCISSELTDASYGPNLLEGLSKMRQENFLCDLVIGTKTKSFDVHKSVMASCSEYFYNILKKDPSIQRVDLNDISPLGLATVIAYAYTGKLTLSLYTIGSIISAAVYLQIHTLVKMCSDFLIREMSVENCMYVVNIAETYSLKNAKAAAQKFIRDNFLEFAESDQFMKLTFEQINELLIDDDLQLPSEIVAFQIAMKWLEFDQKRVKYAADLLSNIRFGTISAQDLVNYVQSVPRMMQDADCHRLLVDAMNYHLLPYHQNTLQSRRTRIRGGCRVLVTVGGRPGLTEKSLSRDILYRDPENGWSKLTEMPAKSFNQCVAVMDGFLYVAGGEDQNDARNQAKHAVSNFCRYDPRFNTWIHLASMNQKRTHFSLSVFNGLVYAAGGRNAEGSLASLECYVPSTNQWQPKTPLEVARCCHASAVADGRVLVTGGYIANAYSRSVCAYDPASDSWQELPNLSTPRGWHCAVTLSDRVYVMGGSQLGPRGERVDVLTVECYSPATGQWSYAAPLQVGVSTAGVSALHGRAYLVGGWNEGEKKYKKCIQCFSPELNEWTEDDELPEATVGVSCCTLSMPNNVTRESRASSVSSVPVSI

SEQ ID NO: 1261 - protein, 505 aa, Homo sapiens [sequence omitted]

SEQ ID NO: 1262 - protein, 513 aa, Homo sapiens
PAIHEFPTDLFSNKERQHGAVLLHILGALYMFYALAIVCDDFFVPSLEKICERLHLSEDVAGATFMAAGSSTPELFASVIGVFITHGDVGVGTIVGSAVFNILCIIGVCGLFAGQVVRLTWWAVCRDSVYYTISVIVLIVFIYDEQIVWWEGLVLIILYVFYILIMNGPSTWVLSSERSALITVLRSTVKEKPQYGKNPVVMVDEIMSSSPPKFTFPEAGLRIMITNKFGPRTRLRMASRIIINERQRLINSANGVSSKPLQNGRHENIENGNVPVENPEDPQQNQEQQPPPQPPPPEPEPVEADFLSPFSVPEARGDKVKWVFTWPLIFLLCVTIPNCSKPRWEKFFMVTFITATLWIAVFSYIMVWLVTIIGYTLGIPDVIMGITFLAAGTSVPDCMASLIVARQGLGDMAVSNTIGSNVFDILVGLGVPWGLQTMVVNYGSTVKINSRGLVYSVVLLLGSVALTVLGIHLNKWRLDRKLGVYVLVLYAIFLCFSIMIEFNVFTFVNLPMC

SEQ ID NO: 1263 - protein, 249 aa, Homo sapiens
MASRRMETKPVITCLKTLLIIYSFVFWITGVILLAVGVWGKLTLGTYISLIAENSTNAPYVLIGTGTTIVVFGLFGCFATCRGSPWMLKLYAMFLSLVFLAELVAGISGFVFRHEIKDTFLRTYTDAMQTYNGNDERSRAVDHVQRSLSCCGVQNYTNWSTSPYFLEHGIPPSCCMNETDCNPQDLHNLTVAATKVNQKGCYDLVTSFMETNMGIIAGVAFGIAFSQLIGMLLACCLSRFITANQYEMV

SEQ ID NO: 1264 - protein, 676 aa, Homo sapiens [sequence omitted]

SEQ ID NO: 1265 - protein, 414 aa, Homo sapiens
NVLEGDSMDQDVESPVAIHQPKLPKQARDDLPRHISRDRTKRKIQRYVRKDGKCNVHHGNVRETYRYLTDIFTTLVDLKWRFNLLIFVMVYTVTWLFFGMIWWLIAYIRGDMDHIEDPSWTPCVTNLNGFVSAFLFSIETETTIGYGYRVITDKCPEGIILLLIQSVLGSIVNAFMVGCMFVKISQPKKRAETLVFSTHAVISMRDGKLCLMFRVGDLRNSHIVEASIRAKLIKSKQTSEGEFIPLNQTDINVGYYTGDDRLFLVSPLIISHEINQQSPFWEISKAQLPKEELEIVVILEGMVEATGMTCQARSSYITSEILWGYRFTPVLTLEDGFYEVDYNSFHETYETSTPSLSAKELAELASRAELPLSWSVSSKLNQHAELETEEEEKNLEEQTERNGDVANLENESKV

SEQ ID NO: 1266 - protein, 187 aa, Homo sapiens
IIVGETAVFCLQLATRDFENQEKTILTGDCCYINPLVRRTVRFLGIYTFGLFATDIFVNAGQVVTGNLAPHFLALCKPNYTALGCQQYTQFISGEEACTGNPDLIMRARKTFPSKEAALSVYAAMYLTMYITNTIKAKGTRLAKPVLCLGLMCLAFLTGLNRVAEYRNHWSDVIAGFLVGISIAVFL

SEQ ID NO: 1267 - protein, 255 aa, Homo sapiens
MASPRSSGQPGPPPPPPPPPARLLLLLLLPLLLPLAPGAWGWARGAPRPPPSSPPLSIMGLMPLTKEVAKGSIGRGVLPAVELAIEQIRNESLLRPYFLDLRLYDTECDNAKGLKAFYDAIKYGPNHLMVFGGVCPSVTSIIAESLQGWNLVQLSFAATTPVLADKKKYPYFFRTVPSDNAVNPAILKLLKHYQWKRVGTLTQDVQRFSEVRNDLTGVLYGEDIEISDTESFSNDPCTSVKKLKGNDVRIILGQF

SEQ ID NO: 1268 - protein, 430 aa, Homo sapiens
MAEITNIRPSFDVSPVVAGLIGASVLVVCVSVTVFVWSCCHQQAEKKQKNPPYKFIHMLKGISIYPETLSNKKKIIKVRRDKDGPGREGGRRNLLVDAAEAGLLSRDKDPRGPSSGSCIDQLPIKMDYGEELRSPITSLTPGESKTTSPSSPEEDVMLGSLTFSVDYNFPKKALVVTIQEAHGLPVMDDQTQGSDPYIKMTILPDKRHRVKTRVLRKTLDPVFDETFTFYGIPYSQLQDLVLHFLVLSFDRFSRDDVIGEVMVPLAGVDPSTGKVQLTRDIIKRNIQKCISRGELQVSLSYQPVAQRMTVVVLKARHLPKMDITGLSDPYVKVNVYYGRKRIAKKKTHVKKCTLNPIFNESFIYDIPTDLLPDISIEFLVIDFDRTTKNEVVGRLILGAHSVTASGAEHWREVCESPRKPVAKWHSLSEY

SEQ ID NO: 1269 - protein, 383 aa, Homo sapiens
  VARIANT 79, 80: Xaa = Any Amino Acid
KAPSVIITGLKPATKYVFHIRVRTATGYSGYSQKFEFETGDETSDMAAEQGQILVIATAAVGGFTLLVILTLFFLITGXXRFPGIKTYIDPDTYEDPSLAVHEFAKEIDPSRIRIERVIGAGEFGEVCSGRLKTPGKREIPVAIKTLKGGHMDRQRRDFLREASIMGQFDHPNIIRLEGVVTKSRPVMIVVEYMENGSLDSFLRKHDGHFTVIQLVGMLRGIASGMKYLSDMGYVHRDLAARNILVNSNLVCKVSDFGLSRVLEDDPEAAYTTTGGKIPIRWTAPEAIAYRKFSSASDAWSYGIVMWEVMSYGERPYWEMSNQDVILSIEEGYRLPAPMGCPASLHQLMLHCWQKERNHRPKFTDIVSFLDKLIRNPSALHTL

SEQ ID NO: 1270 - protein, 208 aa, Homo sapiens
MDRSLGWQGNSVPEDRTEAGIKRFLEDTTDDGELSKFVKDFSGNASCHPPEAKTWASRPQVPEPRPQAPDLYDDDLEFRPPSRPQSSDNQQYFCAPAPLSPSARPRSPWGKLDPYDSSEVEPPALPLPFSGLLQEDRGQGAECVCVCVCVCVCVCLCVCVSGTYFSPVSALAPRYLPPRALEICSFSKGRRPSWWPQMGTHRSLALLF

SEQ ID NO: 1271 - protein, 790 aa, Homo sapiens
MRTYRYFLLLFWVGQPYPTLSTPLSKRTSGFPAKKRALELSGNSKNELNRSKRSWMWNQFFLLEEYTGSDYQYVGKLHSDQDRGDGSLKYILSGDGAGDLFIINENTGDIQATKRLDREEKPVYILRAQAINRRTGRPVEPESEFIIKIHDINDNEPIFTKEVYTATVPEMSDVGTFVVQVTATDADDPTYGNSAKVVYSILQGQPYFSVESETGIIKTALLNMDRENREQYQVVIQAKDMGGQMGGLSGTTTVNITLTDVNDNPPRFPQSTYQFKTPESSPPGTPIGRIKASDADVGENAEIEYSITDGEGLDMFDVITDQETQEGIITVKKLLDFEKKKVYTLKVEASNPYVEPRFLYLGPFKDSATVRIVVEDVDEPPVFSKLAYILQIREDAQINTTIGSVTAQDPDAARNPVKYSVDRHTDMDRIFNIDSGNGSIFTSKLLDRETLLWHNITVIATEINNPKQSSRVPLYIKVLDVNDNAPEFAEFYETFVCEKAKADQLIQTLHAVDKDDPYSGHQFSFSLAPEAASGSNFTIQDNKDNTAGILTRKNGYNRHEMSTYLLPVVISDNDYPVQSSTGTVTVRVCACDHHGNMQSCHAEALIHPTGLSTGALVAILLCIVILLVTVVLFAALRRQRKKEPLIISKEDIRDNIVSYNDEGGGEEDTQAFDIGTLRNPEAIEDNKLRRDIVPEALFLPRRTPTARDNTDVRDFINQRLKENDTDPTAPPYDSLATYAYEGTGSVADSLSSLESVTTDADQDYDYLSDWGPRFKKLADMYGGVDSDKDS

SEQ ID NO: 1272 - protein, 255 aa, Homo sapiens
MYLVAGDRGLAGCGHLLVSLLGLLLLLARSGTRALVCLPCDESKCEEPRNCPGSIVQGVCGCCYTCASQRNESCGGTFGIYGTCDRGLRCVIRPPLNGDSLTEYEAGVCEDENWTDDQLLGFKPCNENLIAGCNIINGKCECNTIRTCSNPFEFPSQDMCLSALKRIEEEKPDCSKARCEVQFSPRCPEDSVLIEGYAPPGECCPLPSRCVCNPAGCLRKVCQPGNLNILVSKASGKPGECCDLYECKPVFGVDC

SEQ ID NO: 1273 - protein, 107 aa, Homo sapiens
MFPYEASTPTGISASCRRPIKGAAGRPLELSDFRMEESFSSKYVPKYVPLADVKSEKTKKGRSIPVWIKILLFVVVAVFLFLVYQAMETNQVNPFSNFLHVDPRKSN

SEQ ID NO: 1274 - protein, 321 aa, Homo sapiens
SSRKSLPKVKAMDFITSTAILPLLFGCLGVFGLFRLLQWVRGKAYLRNAVVVITGATSGLGKECAKVFYAAGAKLVLCGRNGGALEELIRELTASHATKVQTHKPYLVTFDLTDSGAIVAAAAEILQCFGYVDILVNNAGISYRGTIMDTTVDVDKRVMETNYFGPVALTKALLPSMIKRRQGHIVAISSIQGKMSIPFRSAYAASKHATQAFFDCLRAEMEQYEIEVTVISPGYIHTNLSVNAITADGSRYGVMDTTTAQGRSPVEVAQDVLAAVGKKKKDVILADLLPSLAVYLRTLAPGLFFSLMASRARKERKSKNS

SEQ ID NO: 1275 - protein, 233 aa, Homo sapiens
MAWQGLAAEFLQVPAVTRAYTAACVLTTAAVQLELLSPFQLYFNPHLVFRKFQVWRLVTNFLFFGPLGFSFFFNMLFVFRYCRMLEEGSFRGRTADFVFMFLFGGVLMTLLGLLGSLFFLGQALMAMLVYVWSRRSPRVRVNFFGLLTFQAPFLPWALMGFSLLLGNSILVDLLGIAVGHIYYFLEDVFPNQPGGKRLLQTPGFLLATAQQCPHRTGPSAGDFRAARPQLAVA

SEQ ID NO: 1276 - protein, 431 aa, Homo sapiens
DPDSDQPLNSLDVKPLRKPRIPMETFRKVGIPIIIALLSLASIIIVVVLIKVILDKYYFLCGQPLHFIPRKQLCDGELDCPLGEDEEHCVKSFPEGPAVAVRLSKDRSTLQVLDSATGNWFSACFDNFTEALAETACRQMGYSSKPTFRAVEIGPDQDLDVVEITENSQELRMRNSSGPCLSGSLVSLHCLACGKSLKTPRVVGVEEASVDSWPWQVSIQYDKQHVCGGSILDPHWVLTAAHCFRKHTDVFNWKVRAGSDKLGSFPSLAVAKIIIIEFNPMYPKDNDIALMKLQFPLTFSGTVRPICLPFFDEELTPATPLWIIGWGFTKQNGGKMSDILLQASVQVIDSTRCNADDAYQGEVTEKMMCAGIPEGGVDTCQGDSGGPLMYQSDQWHVVGIVSWGYGCGGPSTPGVYTKVSAYLNWIYNVWK

SEQ ID NO: 1277 - protein, 487 aa, Homo sapiens
MMHFKSGLELTELQNMTVPEDDNISNDSNDFTEVENGQINSKFISDRESRRSLTNSHLEKKKCDEYIPGTTSLGMSVFNLSNAIMGSGILGLAFALANTGILLFLVLLTSVTLLSIYSINLLLICSKETGCMVYEKLGEQVFGTTGKFVIFGATSLQNTGAMLSYLFIVKNELPSAIKFLMGKEETFSAWYVDGRVLVVIVTFGIILPLCLLKNLGYLGYTSGFSLSCMVFFLIVVIYKKFQIPCIVPELNSTISANSTNADTCTPKYVTFNSKTVYALPTIAFAFVCHPSVLPIYSELKDRSQKKMQMVSNISFFAMFVMYFLTAIFGYLTFYDNVQSDLLHKYQSKDDILILTVRLAVIVAVILTVPVLFFTVRSSLFELAKKTKFNLCRHTVVTCILLVVINLLVIFIPSMKDIFGVVGVTSANMLIFILPSSLYLKITDQDGDKGTQRIWAALFLGLGVLFSLVSIPLVIYDWACSSSSDEGH

SEQ ID NO: 1278 - protein, 290 aa, Homo sapiens
GGCDAAGSAAALAAVAGVSAEPGPGQQRQRGRTSRSVRGLRGGGASGEAPSPGRRDLGELPSRGAAAAGNDASEAAEERALHRAGQLPVLAGPGAPWHPPVHLRADPRVPQGQPVHHRRLPGLPAVQAVYQKVCMLCSVGYHLFSCHRSEKTCRRWMALDYAGISIGILGCYVSGVFYAFYCNNYWRQVYLITVLAMILAVFFAQIHPNYLTQQWQRLRSIIFCSVSGYGVIPTLHWVWLNGGIGAPIVQNQERRFRECLSHLMASHLDRISDLKIVIDFRKTVQLSIWQ

SEQ ID NO: 1279 - protein, 332 aa, Homo sapiens
MLLETQDALYVALELVIAALSVAGNVLVCAAVGTANTLQTPTNYFLVSLAAADVAVGLFAIPFAITISLGFCTDFYGCLFLACFVLVLTQSSIFSLLAVAVDRYLAICVPLRYKSLVTGTRARGVIAVLWVLAFGIGLTPFLGWNSKDSATNNCTEPWDGTTNESCCLVKCLFENVVPMSYMVYFNFFGCVLPPLLIMLVIYIKIFLVACRQLQRTELMDHSRTTLQREIHAAKSLAMIVGIFALCWLPVHAVNCVTLFQPAQGKNKPKWAMNMAILLSHANSVVNPIVYAYRNRDFRYTFHKIISRYLLCQADVKSGNGQAGVQPALGVGL

SEQ ID NO: 1280 - protein, 255 aa, Homo sapiens
RASAQGAPEAAPARGLLPRSRFPFLAHRRPPSPAPSPSARPTASGSAPPAATMPAARPPAAGLRGISLFLALLLGSPAAALERDALPEGDASPLGPYLLPSGAPERGSPGKEHPEERVVTAPPSSSQSAEVLGELVLDGTAPSAHHDIPALSPLLPEEARPKHALPPKKKLPSLKQVNSARKQLRPKATSAATVQRAGSQPASQGLDLLSSSTEKPGPPGDPDPIVASEEASEVPLWLDRKESAVPTTPAPLQIS

SEQ ID NO: 1281 - protein, 308 aa, Homo sapiens
MRRAALWLWLCALALSLQPALPQIVATNLPPEDQDGSGDDSDNFSGSGAGALQDITLSQQTPSTWKDTQLLTAIPTSPEPTGLEATAASTTLPAGEGPKEGEAVVLPEVEPGLTAREQEAPRPRETTQLPTTHLASTTTATTAQEPATSHPHRDMQPGHHETSTPAGPSQADLHTPHTEDGGPSATERAAEDGASSQLPAAEGSGEQDFTFETSGENTAVVAVEPDRRNQSPVDQGATGASQGLLDRKEVLGGVIAGGLVGLIFAVCLVGFMLYRMKKKDEGSYSLEEPKQANGGAYQKPTKQEEFYA

SEQ ID NO: 1282 - protein, 589 aa, Homo sapiens
MRPLPGALGVAAAAALWLLLLLLPRTRADEHEHTYQDKEEVVLWMNTVGPYHNRQETYKYFSLPFCVGSKKSISHYHETLGEALQGVELEFSGLDIKFKDDVMPATYCEIDLDKEKRDAFVYAIKNHYWYQMYIDDLPIWGIVGEADENGEDYYLWTYKKLEIGFNGNRIVDVNLTSEGKVKLVPNTKIQMSYSVKWKKSDVKFEDRFDKYLDPSFFQHRIHWFSIFNSFMMVIFLVGLVSMILMRTLRKDYARYSKEEEMDDMDRDLGDEYGWKQVHGDVFRPSSHPLIFSSLIGSGCQIFAVSLIVIIVAMIEDLYTERGSMLSTAIFVYAATSPVNGYFGGSLYARQGGRRWIKQMFIGAFLIPAMVCGTAFFINFIAIYYHASRAIPFGTMVAVCCICFFVILPLNLVGTILGRNLSGQPNFPCRVNAVPRPIPEKKWFMEPAVIVCLGGILPFGSIFIEMYFIFTSFWAYKIYYVYGFMMLVLVILCIVTVCVTIVCTYFLLNAEDYRWQWTSFLSAASTAIYVYMYSFYYYFFKTKMYGLFQTSFYFGYMAVFSTALGIMCGAIGYMGTSAFVRKIYTNVKID

SEQ ID NO: 1283 - protein, 255 aa, Homo sapiens
MRWAAATLRGKARPRGRAGVTTPAPGNRTGTCAKLRLPPQATFQVLRGNGASVGTVLMFRCPSNHQMVGSGLLTCTWKGSIAEWSSGSPVCKLVPPHETFGFKVAVIASIVSCAIILLMSMAFLTCCLLKCVKKSKRRRSNRSAQLWSQLKDEDLETVQAAYLGLKHFNKPVSGPSQAHDNHSFTTDHGESTSKLASVTRSVDKDPGIPRALSLSGSSSSPQAQVMVHMANPRQPLPASGLATGMPQQPAAYALG

SEQ ID NO: 1284 - protein, 344 aa, Homo sapiens
MRRPRQGGGGAGGSAAARARAGGLGGGSVPARARGAPAAARAAWLRDLCARMARPPRQHPGVWASLLLLLLTGPAACAASPADDGAGPGGRGPRGRARGDTGADEAVPRHDSSYGTFAGEFYDLRYLSEEGYPFPTAPPVDPFAKIKVDDCGKTKGCFRYGKPGCNAETCDYFLSYRMIGADVEFELSADTDGWVAVGFSSDKKMGGDDVMACVHDDNGRVRIQHFYNVGQWAKEIQRNPARDEEGVFENNRVTCRFKRPVNVPRDETIVDLHLSWYYLFAWGPAIQGSITRHDIDSPPASERVVSIYKYEDIFMPSAAYQTFSSPFCLLLIVALTFYLLMGTP

SEQ ID NO: 1285 - protein, 482 aa, Homo sapiens
VIGIQLVVTMVMASVMQKIIPHYSLARWLLCNGSLRWYQHPTEEELRILAGKQQKGKTKKDRKYNGHIESKPLTIPKDIDLHLETKSVTEVDTLALHYFPEYQWLVDFTVAATVVYLVTEVYYNFMKPTQEMNISLVWCLLVLSFAIKVLFSLTTHYFKVEDGGERSVCVTFGFFFFVKAMAVLIVTENYLEFGLETGFTNFSDSAMQFLEKQGLESQSPVSKLTFKFFLAIFCSFIGAFLTFPGLRLAQMHLDALNLATEKITQTLLHINFLAPLFMVLLWVKPITKDYIMNPPLGKESIPLMTEATFDTLRLWLIILLCALRLAMMRSHLQAYLNLAQKCVDQMKKEAGRISTVELQKMVARVFYYLCVIALQYVAPLVMLLHTTLLLKTLGNHSWGIYPESISTLPVDNSLLSNSVYSELPSAEGKMKVTVTQITVALSSLKNIFTPLLFRGLLSFLTWWIAACLFSTSLFGLFYHQYL

SEQ ID NO: 1286 - protein, 255 aa, Homo sapiens
MGDAEGEDEVQFLRTDDEVVLQCSATVLKEQLKLCLAAEGFGNRLCFLEPTSNAQNVPPDLAICCFVLEQSLSVRALQEMLANTVEAGVESSQGGGHRTLLYGHAILLRHAHSRMYLSCLTTSRSMTDKLAFDVGLQEDATGEACWWTMHPASKQRSEGEKVRVGDDIILVSVSSERYLHLSTASGELQVDASFMQTLWNMNPICSRCEEGFVTGGHVLRLFHGHMDECLTISPADSDDQRRLVYYEGGAVCTHA

SEQ ID NO: 1287 - protein, 486 aa, Homo sapiens
KLTGRLMLAVGGAVLGSLQFGYNTGVINAPQKVIEEFYNQTWVHRYGESILPTTLTTLWSLSVAIFSVGGMIGSFSVGLFVNRFGRRNSMLMMNLLAFVSAVLMGFSKLGKSFEMLILGRFIIGVYCGLTTGFVPMYVGEVSPTALRGALGTLHQLGIVVGILIAQVFGLDSIMGNKDLWPLLLSIIFIPALLQCIVLPFCPESPRFLLINRNEENRAKSVLKKLRGTADVTHDLQEMKEESRQMMREKKVTILELFRSPAYRQPILIAVVLQLSQQLSGINAVFYYSTSIFEKAGVQQPVYATIGSGIVNTAFTVVSLFVVERAGRRTLHLIGLAGMAGCAILMTIALALLEQLPWMSYLSIVAIFGFVAFFEVGPGPIPWFIVAELFSQGPRPAAIAVAGFSNWTSNFIVGMCFQYVEQLCGPYVFIIFTVLLVLFFIFTYFKVPETKGRTFDEIASGFRQGGASQSDKTPEELFHPLGADSQV

SEQ ID NO: 1288 - protein, 255 aa, Homo sapiens
GSKTAAPVTSTGSTTATLEGQSTAASSRTSNQDISASSQNHQTKSTETTSKAQTDTLTQMMTSTLFSSPSVHNVMETAPPDEMTTSFPSSVTNTLMMTSKTITMTTSTDSTLGNTEETSTAGTESSTPVTSAVSITAGQEGQSRTTSWRTSIQDTSASSQNHWTRSTQTTRESQTSTLTHRTTSTPSFSPSVHNVTGTVSQKTSPSGETATSSLCSVTNTSMMTSEKITVTTSTGSTLGNPGETSSVPVTGSLMP

SEQ ID NO: 1289 - protein, 500 aa, Homo sapiens
PSVPPTTTNSSRGTNSTLAKITTSAKTTMKPPTATPTTARTRPTTDVSADAATAATTTTTIASTTTTTTIIVTTNTTITITITTTTTNTTTTITITTTITITTTITITTTIATTIITITITIATTITTTITTTTIITIATTITTITTTIATTTTTTITITTITATPNTTTIATTTITTTTTITTIIATTIITTITTTTTITTTTIATITPNTTTITTITTTITTITIATGTSTATTTTTTTTTTTIAITVPRFIPSTPIPSTPIPSTPIPSTPIPSTVIPSTPIPSTVIPSTVIPSTPIPSTVIPSTPIPSTVIPSTVIPSTPIPSTVIPSTPIPSTPIPSTPIPSTPIPSTPIPSTVIPSTPIPSTPIPSTPIPSTPIPSTPIPSTPIPSTPIPSTVIPSTPIPSTPIPSTSIPSTPIPSTPIPSTPIPSTPLPSTPIPSTPIPSTPIPSTPIPSTPIPSTSIPSTPIPSTPIPSTPIPSTAIPSTPIPSTPIPSTPLF

SEQ ID NO: 1290 - protein, 365 aa, Homo sapiens
MAVMAPRTLLLLLSGALALTQTWAGSHSMRYFFTSVSRPGRGEPRFIAVGYVDDTQFVRFDSDAASQRMEPRAPWIEQEGPEYWDQETRNVKAQSQTDRVDLGTLRGYYNQSEAGSHTIQIMYGCDVGSDGRFLRGYRQDAYDGKDYIALNEDLRSWTAADMAAQITKRKWEAAHEAEQLRAYLDGTCVEWLRRYLENGKETLQRTDPPKTHMTHHPISDHEATLRCWALGFYPAEITLTWQRDGEDQTQDTELVETRPAGDGTFQKWAAVVVPSGEEQRYTCHVQHEGLPKPLTLRWEPSPQPTIPIVGIIAGLVLLGAVVTGAVVTAVMWRKKSSDRKGGSYSQAASSQSAQGSDVSLTACKA

SEQ ID NO: 1291 - protein, 287 aa, Homo sapiens
MVGQMYCYPGSHLARALTRALALALVLALLVGPFLSGLAGAIPAPGGRWARDGQVPPASRSRSVLLDVSAGQLLMVDGRHPDAVAWANLTNAIRETGWAFLELGTSGQYNDSLQAYAAGVVEAAVSEELIYMHWMNTVVNYCGPFEYEVGYCERLKSFLEANLEWMQEEMESNPDSPYWHQVRLTLLQLKGLEDSYEGRVSFPAGKFTIKPLGFLLLQLSGDLEDLELALNKTKIKPSLGSGSCSALIKLLPGQSDLLVAHNTWNNYQHMLRVIKKYWLQFREGPWG

SEQ ID NO: 1292 - protein, 657 aa, Homo sapiens
MQWRALVLGLVLLRLGLHGVLWLVFGLGPSMGFYQRFPLSFGFQRLRSPDGPASPTSGPVGRPGGVSGPSWLQPPGTGAAQSPRKAPRRPGPGMCGPANWGYVLGGRGRGPDEYEKRYSGAFPPQLRAQMRDLARGMFVFGYDNYMAHAFPQDELNPIHCRGRGPDRGDPSNLNINDVLGNYSLTLVDALDTLAIMGNSSEFQKAVKLVINTVSFDKDSTVQVFEATIRVLGSLLSAHRIITDSKQPFGDMTIKDYDNELLYMAHDLAVRLLPAFENTKTGIPYPRVNLKTGVPPDTNNETCTAGAGSLLVEFGILSRLLGDSTFEWVARRAVKALWNLRSNDTGLLGNVVNIQTGHWVGKQSGLGAGLDSFYEYLLKSYILFGEKEDLEMFNAAYQSIQNYLRRGREACNEGEGDPPLYVNVNMFSGQLMNTWIDSLQAFFPGLQVLIGDVEDAICLHAFYYAIWKRYGALPERYNWQLQAPDVLFYPLRPELVESTYLLYQATKNPFYLHVGMDILQSLEKYTKVKCGYATLHHVIDKSTEDRMESFFLSETCKYLYLLFDEDNPVHKSGTRYMFTTEGHIVSVDEHLRELPWKEFFSEEGGQDQGGKSVHRPKPHELKVINSSSNCNRVPDERRYSLPLKSIYMRQIDQMVGLI

SEQ ID NO: 1293 - protein, 546 aa, Homo sapiens
GARRAAAAAAAAGAFAGRRAACGAVLLTELLERAAFYGITSNLVLFLNGAPFCWEGAQASEALLLFMGLTYLGSPFGGWLADARLGRARAILLSLALYLLGMLAFPLLAAPATRAALCGSARLLNCTAPGPDAAARCCSPATFAGLVLVGLGVATVKANITPFGADQVKDRGPEATRRFFNWFYWSINLGAILSLGGIAYIQQNVSFVTGYAIPTVCVGLAFVVFLCGQSVFITKPPDGSAFTDMFKILTYSCCSQKRSGERQSNGEGIGVFQQSSKQSLFDSCKMSHGGPFTEEKVEDVKALVKIVPVFLALIPYWTVYFQMQTTYVLQSLHLRIPEISNITTTPHTLPAAWLTMFDAVLILLLIPLKDKLVDPILRRHGLLPSSLKRIAVGMFFVMCSAFAAGILESKRLNLVKEKTINQTIGNVVYHAADLSLWWQVPQYLLIGISEIFASIAGLEFAYSAAPKSMQSAIMGLFFFFSGVGSFVGSGLLALVSIKAIGWMSSHTDFGNINGCYLNYYFFLLAAIQGATLLLFLIISVKYDHHR

SEQ ID NO: 1294 - protein, 278 aa, Homo sapiens
MGKSSEWCERIAGIQKFVLEKWTKKAKPEDTLNLCQLLNNDLASTVVSYPRRFVGLGTLPMQAPELAVKEMERCVKELGFPGVQIGTHVNEWDLNAQELFPVYAAAERLKCSLFVHPWDMQMDGRMAKYWLPWLVGMPAETTIAICSMIMGGVFEKFPKLKVCFAHGGGAFPFTVGRISHGFSMRPDLCAQDNPMNPKKYLGSFYTDALVHDPLSLKLLTDVIGKDKVILGTDYPFPLGELEPGKLIESMEEFDEETKNKLKAGNALAFLGLERKQFE

SEQ ID NO: 1295 - protein, 371 aa, Homo sapiens
MAWTKYQLFLAGLMLVTGSINTLSAKWADNFMAEGCGGSKEHSFQHPFLQAVGMFLGEFSCLAAFYLLRCRAAGQSDSSVDPQQPFNPLLFLPPALCDMTGTSLMYVALNMTSASSFQMLRGAVIIFTGLFSVAFLGRRLVLSQWLGILATIAGLVVVGLADLLSKHDSQHKLSEVITGDLLIIMAQIIVAIQMVLEEKFVYKHNVHPLRAVGTEGLFGFVILSLLLVPMYYIPAGSFSGNPRGTLEDALDAFCQVGQQPLIAVALLGNISSIAFFNFAGISVTKELSATTRMVLDSLRTVVIWALSLALGWEAFHALQILGFLILLIGTALYNGLHRPLLGRLSRGRPLAEESEQERLLGGTRTPINDAS

SEQ ID NO: 1296 - protein, 199 aa, Homo sapiens
MSAARPQFSIDDAFELSLEDGGPGPESSGVARFGPLHFERQARFEVADEDKHNPPETCVLQQNLENDEDGAQASPEPDGGVGTRDSSRTSIRSSQWSFSTISSSTQRSYNTCCSWTQHPLIQKNRRVVLASFLLLLLGLVLILVGVGLEATPSPGVSSAIFFVPGFLLLVPGVYHVIFMYCAVKGHRGFQFFYLPYFEK

SEQ ID NO: 1297 - protein, 214 aa, Homo sapiens
LAPVFALFVPFYCSIPRVQVAQILGPLSITNKTLIYILGLQLFTSGSYIWIVAISGLMSGLCYDSKMFQVHQVLCIPSWMAKFFSWTLEPIFSSSEPTSEARIGMGATLDIQRQQRMELLDRQLMFSQFAQGRRQRQQQGGMINWNRLFPPLRQRQNVNYQGGRQSEPAAPPLEVSEEQVARLMEMGFSRGDALEALRASNNDLNVATNFLLQH

SEQ ID NO: 1298 - protein, 272 aa, Homo sapiens
MSSTESAGRTADKSPRQQVDRLLVGLRWRRLEEPLGFIKVLQWLFAIFAFGSCGSYSGETGAMVRCNNEAKDVSSIIVAFGYPFRLHRIQYEMPLCDEESSSKTMHLMGDFSAPAEFFVTLGIFSFFYTMAALVIYLRFHNLYTENKRFPLVDFCVTVSFTFFWLVAAAAWGKGLTDVKGATRPSSLTAAMSVCHGEEAVCSAGATPSMGLANISVLFGFINFFLWAGNCWFVFKETPWHGQGQGQDQDQDQDQGQGPSQESAAEQGAVEKQ

SEQ ID NO: 1299 - protein, 185 aa, Homo sapiens
MAGPRPRWRDQLLFMSIIVLVIVVICLMFYALLWEAGNLTDLPNLRIGFYNFCLWNEDTSTLQCHQFPELEALGVPRVGLGLARLGVYGSLVLTLFAPQPLLLAQCNSDERAWRLAVGFLAVSSVLLAGGLGLFLSYVWKWVRLSLPGPGFLALGSAQALLILLLIAMAVFPLRAERAESKLESC

SEQ ID NO: 1300 - protein, 337 aa, Homo sapiens
SATARGAHQPDNTAFTQQRLPAWQPLLSASIALPLFFCAGLAFIGLGLGLYYSSNGIKELEYDYTGDPGTGNCSVCAAAGQGRALPPPCSCAWYFSLPELFQGPVYLYYELTNFYQNNRRYGVSRDDAQLSGLPSALRHPVNECAPYQRSAAGLPIAPCGAIANSLFNDSFSLWHQRQPGGPYVEVPLDRSGIAWWTDYHVKFRNPPLVNGSLALAFQGTAPPPNWRRPVYELSPDPNNTGFINQDFVVWMRTAALPTFRKLYARIRQGNYSAGLPRGAYRVNITYNYPVRAFGGHKLLIFSSISWMGGKNPFLGIAYLVVGSLCILTGFVMLVVYI

SEQ ID NO: 1301 - protein, 303 aa, Homo sapiens
MGRPLLLPLLPLLLPPAFLQPSGSTGSGPSYLYGVTQPKHLSASMGGSVEIPFSFYYPWELATAPDVRISWRRGHFHRQSFYSTRPPSIHKDYVNRLFLNWTEGQKSGFLRISNLQKQDQSVYFCRVELDTRSSGRQQWQSIEGTKLSITQAVTTTTQRPSSMTTTWRLSSTTTTTGLRVTQGKRRSDSWHISLETAVGVAVAVTVLGIMILGLICLLRWRRRKGQQRTKATTPAREPFQNTEEPYENIRNEGQNTDPKLNPKDDGIVYASLALSSSTSPRAPPSHRPLKSPQNETLYSVLKA

SEQ ID NO: 1302 - protein, 399 aa, Homo sapiens
MGTCDIVTEANISSGPESNTTGITAFSMPSWQLALWATAYLALVLVAVTGNAIVIWIILAHRRMRTVTNYFIVNLALADLCMAAFNAAFNFVYASHNIWYFGRAFCYFQNLFPITAMFVSIYSMTAIAADRQYMAIVHPFQPRLSAPSTKAVIAGIWLVALALASPQCFYSTVTMDQGATKCVVAWPEDSGGKTLLLYHLVVIALIYFLPLAVMFVAYSVIGLTLWRRAVPGHQAHGANLRHLQAMKKFVKTMVLVVLTFAICWLPYHLYFILGSFQEDIYCHKFIQQVYLALFWLAMSSTMYNPIIYCCLNHRFRSGFRLAFRCCPWVTPTKEDKLELTPTTSLSTRVNRCHTKETLFMAGDTAPSEATSGEAGRPQDGSGLWFGYGLLAPTKTHVEI

SEQ ID NO: 1303 - protein, 438 aa, Homo sapiens
MRTLLPPALLTCWLLAPVNSIHPECRFHLEIQEEETKCAELLRSQTEKHKACSGVWDNITCWRPANVGETVTVPCPKVFSNFYSKAGNISKNCTSDGWSETFPDFVDACGYSDPEDESKITFYILVKAIYTLGYSVSLMSLATGSIILCLFRKLHCTRNYIHLNLFLSFILRAISVLVKDDVLYSSSGTLHCPDQPSSWVGCKLSLVFLQYCIMANFFWLLVEGLYLHTLLVAMLPPRRCFLAYLLIGWGLPTVCIGAWTAARLYLEDTGCWDTNDHSVPWWVIRIPILISIIVNFVLFISIIRILLQKLTSPDVGGNDQSQYKRLAKSTLLLIPLFGVHYMVFAVFPISISSKYQILFELCLGSFQGLVVAVLYCFLNSEVQCELKRKWRSRCPTPSASRDYRVCGSSFSRNGSEGALQFHRGSRAQSFLQTETSVI

SEQ ID NO: 1304 - protein, 382 aa, Homo sapiens
MGLGPVFLLLAGIFPFAPPGAAAEPHSLRYNLTVLSWDGSVQSGFLAEVHLDGQPFLRYDRQKCRAKPQGQWAEDVLGNKTWDRETRDLTGNGKDLRMTLAHIKDQKEGLHSLQEIRVCEIHEDNSTRSSQHFYYDGELFLSQNLETEEWTVPQSSRAQTLAMNVRNFLKEDAMKTKTHYHAMHADCLQELRRYLESGVVLRRTVPPMVNVTRSEASEGNITVTCRASSFYPRNIILTWRQDGVSLSHDTQQWGDVLPDGNGTYQTWVATRICRGEEQRFTCYMEHSGNHSTHPVPSGKVLVLQSHWQTFHVSAVAAAAIFVIIIFYVRCCKKKTSAAEGPELVSLQVLDQHPVGTSDHRDATQLGFQPLMSALGSTGSTEG

SEQ ID NO: 1305 - protein, 394 aa, Homo sapiens
RVSPLQKSEIVDVVKKRVKAITLAIGDGANDVGMIQTAHVGVGISGNEGMQATNNSDYAIAQFSYLEKLLLVHGAWSYNRVTKCILYCFYKNVVLYIIELWFAFVNGFSGQILFERWCIGLYNVIFTALPPFTLGIFERSCTQESMLRFPQLYKITQNGEGFNTKVFWGHCINALVHSLILFWFPMKALEHDTVLTSGHATDYLFVGNIVYTYVVVTVCLKAGLETTAWTKFSHLAVWGSMLTWLVFFGIYSTIWPTIPIAPDMRGQATMVLSSAHFWLGLFLVPTACLIEDVAWRAAKHTCKKTLLEEVQELETKSRVLGKAVLRDSNGKRLNERDRLIKRLGRKTPPTLFRGSSLQQGVPHGYAFSQEEHGAVSQEEVIRAYDTTKKKSRKK

SEQ ID NO: 1306 - protein, 315 aa, Homo sapiens
MVDLSVSPDSLKPVSLTSSLVFLMHLLLLQPGEPSSEVKVLGPEYPILALVGEEVEFPCHLWPQLDAQQMEIRWFRSQTFNVVHLYQEQQELPGRQMPAFRNRTKLVKDDIAYGSVVLQLHSIIPSDKGTYGCRFHSDNFSGEALWELEVAGLGSDPHLSLEGFKEGGIQLRLRSSGWYPKPKVQWRDHQGQCLPPEFEAIVWDAQDLFSLETSVVVRAGALSNVSVSIQNLLLSQKKELVVQIADVFVPGASAWKSAFVATLPLLLVLAALALGVLRKQRRSREKLRKQAEKRQGERGQGVLHAPAQVPKPAVI

SEQ ID NO: 1307 - protein, 524 aa, Homo sapiens
MAGLWLGLVWQKLLLWGAASAVSLAGASLVLSLLQRVASYARKWQQMRPIPTVARAYPLVGHALLMKPDGREFFQQIIEYTEEYRHMPLLKLWVGPVPMVALYNAENVEVILTSSKQIDKSSMYKFLEPWLGLGLLTSTGNKWRSRRKMLTPTFHFTILEDFLDIMNEQANILVKKLEKHINQEAFNCFFYITLCALDIICETAMGKNIGAQSNDDSEYVRAVYRMSEMIFRRIKMPWLWLDLWYLMFKEGWEHKKSLQILHTFTNSVIAERANEMNANEDCRGDGRGSAPSKNKRRAFLDLLLSVTDDEGNRLSHEDIREEVDTFMFEGHDTTAAAINWSLYLLGSNPEVQKKVDHELDDVFGKSDRPATVEDLKKLRYLECVIKETLRLFPSVPLFARSVSEDCEVAGYRVLKGTEAVIIPYALHRDPRYFPNPEEFQPERFFPENAQGRHPYAYVPFSAGPRNCIGQKFAVMEEKTILSCILRHFWIESNQKREELGLEGQLILRPSNGIWIKLKRRNADE

SEQ ID NO: 1308 - protein, 337 aa, Homo sapiens
MNANKDERLKARSQDFHLFPALMMLSMTMLFLPVTGTLKQNIPRLKLTYKDLLLSNSCIPFLGSSEGLDFQTLLLDEERGRLLLGAKDHIFLLSLVDLNKNFKKIYWPAAKERVELCKLAGKDANTECANFIRVLQPYNKTHIYVCGTGAFHPICGYIDLGVYKEDIIFKLDTHNLESGRLKCPFDPQQPFASVMTDEYLYSGTASDFLGKDTAFTRSLGPTHDHHYIRTDISEHYWLNGAKFIGTFFIPDTYNPDDDKIYFFFRESSQEGSTSDKTILSRVGRVSPCRSFVLSFQRKILKSVSRNNPLKIETTQIDVDWTVAVGSIINDKSSKEYE

SEQ ID NO: 1309 - protein, 255 aa, Homo sapiens
MASVAWAVLKVLLLLPTQTWSPVGAGNPPDCDAPLASALPRSSFSSSSELSSSHGPGFSRLNRRDGAGGWTPLVSNKYQWLQIDLGERMEVTAVATQGGYGSSDWVTSYLLMFSDGGRNWKQYRREESIWGFPGNTNADSVVHYRLQPPFEARFLRFLPLAWNPRGRIGMRIEVYGCAYKSEVVYFDGQSALLYRLDKKPLKPIRDVISLKFKAMQSNGILLHREGQHGNHITLELIKGKLVFFLNSGNAKLPST

SEQ ID NO: 1310 - protein, 250 aa, Homo sapiens
MNSMTSAVPVANSVLVVAPHNGYPVTPGIMSHVPLYPNSQPQVHLVPGNPPSLVSNVNGQPVQKALKEGKTLGAIQIIIGLAHIGLGSIMATVLVGEYLSISFYGGFPFWGGLWFIISGSLSVAAENQPYSYCLLSGSLGLNIVSAICSAVGVILFITDLSIPHPYAYPDYYPYAWGVNPGMAISGVLLVFCLLEFGIACASSHFGCQLVCCQSSNVSVIYPNIYAANPVITPEPVTSPPSYSSEIQANK

SEQ ID NO: 1311 - protein, 760 aa, Homo sapiens
MMDQARSAFSNLFGGEPLSYTRFSLARQVDGDNSHVEMKLAVDEEENADNNTKANVTKPKRCSGSICYGTIAVIVFFLIGFMIGYLGYCKGVEPKTECERLAGTESPVREEPGEDFPAARRLYWDDLKRKLSEKLDSTDFTGTIKLLNENSYVPREAGSQKDENLALYVENQFREFKLSKVWRDQHFVKIQVKDSAQNSVIIVDKNGRLVYLVENPGGYVAYSKAATVTGKLVHANFGTKKDFEDLYTPVNGSIVIVRAGKITFAEKVANAESLNAIGVLIYMDQTKFPIVNAELSFFGHAHLGTGDPYTPGFPSFNHTQFPPSRSSGLPNIPVQTISRAAAEKLFGNMEGDCPSDWKTDSTCRMVTSESKNVKLTVSNVLKEIKILNIFGVIKGFVEPDHYVVVGAQRDAWGPGAAKSGVGTALLLKLAQMFSDMVLKDGFQPSRSIIFASWSAGDFGSVGATEWLEGYLSSLHLKAFTYINLDKAVLGTSNFKVSASPLLYTLIEKTMQNVKHPVTGQFLYQDSNWASKVEKLTLDNAAFPFLAYSGIPAVSFCFCEDTDYPYLGTTMDTYKELIERIPELNKVARAAAEVAGQFVIKLTHDVELNLDYERYNSQLLSFVRDLNQYRADIKEMGLSLQWLYSARGDFFRATSRLTTDFGNAEKTDRFVMKKLNDRVMRVEYHFLSPYVSPKESPFRHVFWGSGSHTLPALLENLKLRKQNNGAFNETLFRNQLALATWTIQGAANALSGDVWDIDNEF

SEQ ID NO: 1312 - protein, 318 aa, Homo sapiens
MPNNSTALSLANVTYITMEIFIGLCAIVGNVLVICVVKLNPSLQTTTFYFIVSLALADIAVGVLVMPLAIVVSLGITIHFYSCLFMTCLLLIFTHASIMSLLAIAVDRYLRVKLTVRYKRVTTHRRIWLALGLCWLVSFLVGLTPMFGWNMKLTSEYHRNVTFLSCQFVSVMRMDYMVYFSFLTWIFIPLVVMCAIYLDIFYIIRNKLSLNLSNSKETGAFYGREFKTAKSLFLVLFLFALSWLPLSIINCIIYFNGEVPQLVLYMGILLSHANSMMNPIVYAYKIKKFKETYLLILKACVVCHPSDSLDTSIEKNSE

SEQ ID NO: 1313 - protein, 416 aa, Homo sapiens
MASAEPLTALSRWYLYAIHGYFCEVMFTAAWEFVVNLNWKFPGVTSVWALFIYGTSILIVERMYLRLRGRCPLLLRCLIYTLWTYLWEFTTGFILRQFNACPWDYSQFDFDFMGLITLEYAVPWFCGALIMEQFIIRNTLRLRFDKDAEPGEPSGALALANGHGPALLPWPSGAPVVLDSHQPWAFGGFNPRVFGGVSPFSVLFSKPLPLAALYPRRSPHLPHPSSLASTGAAGDEALRHPQPSPPCSPSLHCSGWPDAWGVPELHLPTPGLVGCGSAPFSVAQLRTNDALQCTGRLGPLLAVDRPHYPPSHLHSTTQSSGQLVDASIILSQSKSLIGPPGLAAPEVALWAFPGTISSLGPIRSQVQEVLGMATIISVLWERSVGKESATQIYHISLQNTLLFNISRDLPPGAGFV

SEQ ID NO: 1314 - protein, 288 aa, Homo sapiens
MTLLKIALFSQAGIGLTANTFLLFFCICTLPLDCRPKPTDLITCHLALVHLVMLLTVSFLASLDLFESQYFQNDFKCKVFFYMHRGMGLSICTTCLRSVLQAVTITPGTSWFKHKSSNYIIHVFFFLWFLNLSFSSNRIFYTVAASSVSQTNVLNIGKYCSVFSMSFILRATFLILTTLRDAFLVGILLFLIAYMVTLLFRPQSNGPSPGASPEKRAIQTILLLVSFSVVLCWVDFIISFSSAMLWAYGPINQQVQSLVVNVYAVISPLVLLTSDKRRTNILKNTQQK

SEQ ID NO: 1315 - protein, 279 aa, Homo sapiens
MTLLKIALFSQAGIGLTANTFLLFFCICTLPLDCRPKPTDLITCHLALVHLVMLLTVSFLASLDLFESQYFQNDFKCKLLFYTKRVIRGISLCPPWLLSVLQAITVSPRNSWLARFKHKFTNYITNVFLLFWFFNLSFSSSLIFFTVYFSNVTQTDLLNVSKHCSLFPMNLIIGVKLSRDAFLVRVMLLSSAFMWILFFRNQKQSQLHSTSISPRISSEKRATQTILLLSCFVVMYPMNLLISTSSILLWVYDPVVLNFRRLVLNAYATVIPLGQISSD

SEQ ID NO: 1316 - protein, 788 aa, Homo sapiens
MRARPRPRPLWATVLALGALAGVGVGGPNICTTRGVSSCQQCLAVSPMCAWCSDEALPLGSPRCDLKENLLKDNCAPESIEFPVSEARVLEDRPLSDKGSGDSSQVTQVSPQRIALRLRPDDSKNFSIQVRQVEDYPVDIYYLMDLSYSMKDDLWSIQNLGTKLATQMRKLTSNLRIGFGAFVDKPVSPYMYISPPEALENPCYDMKTTCLPMFGYKHVLTLTDQVTRFNEEVKKQSVSRNRDAPEGGFDAIMQATVCDEKIGWRNDASHLLVFTTDAKTHIALDGRLAGIVQPNDGQCHVGSDNHYSASTTMDYPSLGLMTEKLSQKNINLIFAVTENVVNLYQNYSELIPGTTVGVLSMDSSNVLQLIVDAYGKIRSKVELEVRDLPEELSLSFNATCLNNEVIPGLKSCMGLKIGDTVSFSIEAKVRGCPQEKEKSFTIKPVGFKDSLIVQVTFDCDCACQAQAEPNSHRCNNGNGTFECGVCRCGPGWLGSQCECSEEDYRPSQQDECSPREGQPVCSQRGECLCGQCVCHSSDFGKITGKYCECDDFSCVRYKGEMCSGHGQCSCGDCLCDSDWTGYYCNCTTRTDTCMSSNGLLCSGRGKCECGSCVCIQPGSYGDTCEKCPTCPDACTFKKECVECKKFDRGALHDENTCNRYCRDEIESVKELKDTGKDAVNCTYKNEDDCVVRFQYYEDSSGKSILYVVEEPECPKGPDILVVLLSVMGAILLIGLAALLIWKLLITIHDRKEFAKFEEERARAKWDTANNPLYKEATSTFTNITYRGT

SEQ ID NO: 1317 - protein, 654 aa, Homo sapiens
VMLQTLIWCKNCKKEVHACRKSYDCGERNVEVPQMEDMILDCELNWHQASEGLTDYSFYRVWGNNTETLVSKGKEATLTKPMVGPEDAGSYRCELGSVNSSPATIINFHVTVLPKMIKEEKPSPNIVTPGEATTESSISLQPLQPEKMLASRLLGLLICGSLALITGLTFAAMLSGERKEGGSPRFGKLHLPVGLWINSPRKQLAKLGRRWPSAASVKSSSSDTGSRSSEPLPPPPPHVELRRVGAVKAAGGASGSRAKRISQLFRGSGTGTTGSSGAGGPGTPGGAQRWASEKKLPELAAGVAPEPPLATRATAPPGVLKIFGAGLASGANYKSVLATARSTARELVAEALERYGLAGSPGGGPGESSCVDAFALCDALGRPAAAGVGSGEWRAEHLRVLGDSERPLLVQELWRARPGWARRFELRGREEARRLEQEAFGAADSEGTGAPSWRPQKNRSRAASGGAALASPGPGTGSGAPAGSGGKERSENLSLRRSVSELSLQGRRRRQQERRQQALSMAPGAADAQIGTADPGDFDQLTQCLIQAPSNRPYFLLLQGYQDAQVTAAPAPHAQSPIPHLLVGEQQNYNSQKARGALASSTLVGRGPSRFQSRDSQERESRWLRKSPMEEEIGNSSLYSKLEESTVFIKEIPL

SEQ ID NO: 1318 - protein, 255 aa, Homo sapiens
MMMMMMMKKMQHQRQQQADHANEANYARGTRLPLSGEGPTSQPNSSKQTVLSWQAAIDAARQAKAAQTMSTSAPPPVGSLSQRKRQQYAKSKKQGNSSNSRPARALFCLSLNNPIRRACISIVEWKPFDIFILLAIFANCVALAIYIPFPEDDSNSTNHNLEKVEYAFLIIFTVETFLKIIAYGLLLHPNAYVRNGWNLLDFVIVIVGLFSVILEQLTKETEGGNHSSGKSGGFDVKALRAFRVLRPLRLVSGVP

SEQ ID NO: 1319 - protein, 877 aa, Homo sapiens
MLTRLQVLTLALFSKGFLLSLGDHNFLRREIKIEGDLVLGGLFPINEKGTGTEECGRINEDRGIQRLEAMLFAIDEINKDDYLLPGVKLGVHILDTCSRDTYALEQSLEFVRASLTKVDEAEYMCPDGSYAIQENIPLLIAGVIGGSYSSVSIQVANLLRLFQIPQISYASTSAKLSDKSRYDYFARTVPPDFYQAKAMAEILRFFNWTYVSTVASEGDYGETGIEAFEQEARLRNICIATAEKVGRSNIRKSYDSVIRELLQKPNARVVVLFMRSDDSRELIAAASRANASFTWVASDGWGAQESIIKGSEHVAYGAITLELASQPVRQFDRYFQSLNPYNNHRNPWFRDFWEQKFQCSLQNKRNHRRVCDKHLAIDSSNYEQESKIMFVVNAVYAMAHALHKMQRTLCPNTTKLCDAMKILDGKKLYKDYLLKINFTAPFNPNKDADSIVKFDTFGDGMGRYNVFNFQNVGGKYSYLKVGHWAETLSLDVNSIHWSRNSVPTSQCSDPCAPNEMKNMQPGDVCCWICIPCEPYEYLADEFTCMDCGSGQWPTADLTGCYDLPEDYIRWEDAWAIGPVTIACLGFMCTCMVVTVFIKHNNTPLVKASGRELCYILLFGVGLSYCMTFFFIAKPSPVICALRRLGLGSSFAICYSALLTKTNCIARIFDGVKNGAQRPKFISPSSQVFICLGLILVQIVMVSVWLILEAPGTRRYTLAEKRETVILKCNVKDSSMLISLTYDVILVILCTVYAFKTRKCPENFNEAKFIGFTMYTTCIIWLAFLPIFYVTSSDYRVQTTTMCISVSLSGFVVLGCLFAPKVHIILFQPQKNVVTHRLHLNRFSVSGTGTTYSQSSASTYVPTVCNGREVLDSTTSSL

SEQ ID NO: 1320 - protein, 349 aa, Homo sapiens
IATAVKFLQNSRVRQSPLATRRAFLKKKGLTDEEIDMAFQQSGTAADEPSSLGPATQVVPVQPPHLISQPYSPAGSRWRDYGALAIIMAGIAFGFHQLYKKYLLPLILGGREDRKQLERMEAGLSELSGSVAQTVTQLQTTLASVQELLIQQQQKIQELAHELAAAKATTSTNWILESQNINELKSEINSLKGLLLNRRQFPPSPSAPKIPSWQIPVKSPSPSSPAAVNHHSSSDISPVSNESTSSSPGKEGHSPEGSTVTYHLLGPQEEGEGVVDVKGQVRMEVQGEEEKREDKEDEEDEEDDDVSHVDEEDCLGVQREDRRGGDGQINEQVEKLRRPEGASNESERD

SEQ ID NO: 1321 - protein, 763 aa, Homo sapiens
TDNTPFTSVNHMVLDSIYFSRRFHVRCVAKAVDKVGHVGTPLRSNIVTIGTDSAICHTPVVAGTSRGFQAQSFIATLKYLDVKHKEHPNRIHISVQIPHQDGMLPLISTMPLHNLHFLLSESIYRHQHVCSNLVTTYDLRGISEAGFLDDVVYDSTALGPGYDRPFQFDPSVREPKTIQLYKHLNLKSCVWTFDAYYDMTELIDVCGGSVTADFQVRDSAQSFLTVHVPLYVSYIYVTAPRGWASLEHHTEMEFSFFYDTVLWRTGIQTDSVLSARLQIIRIYIREDGRLVIEFKTHAKFRGQFVMEHHTLPEVKSFVLTPDHLGGIEFDLQLLWSAQTFDSPHQLWRATSSYNRKDYSGEYTIYLIPCTVQPTQPWVDPGEKPLACTAHAPERFLIPIAFQQTTRPPVVYSLNTEFQLCNNEKVFLMDPNTSDMSLAEMDYKGAFSKGQILYGRVLWNPEQNLNSAYKLQLEKVYLCTGKDGYVPFFDPTGTIYNEGPQYGCIQPNKHLKHRFLLLDRNQPEVTDKYFHDVPFEAHFASELPDFHVVSNMPGVDGFTLKVDALYKVEAGHQWYLQVIYIIGPDTISGPRVQRSLTAPLRRNRRDLVEPDGQLILDDSLIYDNEGDQVKNGTNMKSLNLEMQELAVAASLSQTGASIGSALAAIMLLLLVFLVACFINRKCQKQRKKKPAEDILEEYPLNTKVEVPKRHPDRVEKNVNRHYCTVRNVNILSEPEAAYTFKGAKVKRLNLEVRVHNNLQDGTEV

SEQ ID NO: 1322 - protein, 255 aa, Homo sapiens
MASAGNAAEPQDRGGGGSGCIGAPGRPAGGGRRRRTGGLRRAAAPDRDYLHRPSYCDAAFALEQISKGKATGRKAPLWLRAKFQRLLFKLGCYIQKNCGKFLVVGLLIFGAFAVGLKAANLETNVEELWVEVGGRVSRELNYTRQKIGEEAMFNPQLMIQTPKEEGANVLTTEALLQHLDSALQASRVHVYMYNRQWKLEHLCYKSGELITETGYMDQIIEYLYPCLIITPLDCFWEGAKLQSGTAYLLGKPPLR

SEQ ID NO: 1323 - protein, 142 aa, Homo sapiens
KYAGSRRSMPLGARILFHGVFYAGGFAIVYYLIQKFHSRALYYKLAVEQLQSHPEAQEALGPPLNIHYLKLIDRENFVDIVDAKLKIPVSGSKSEGLLYVHSSRGGPFQRWHLDEVFLELKDGQQIPVFKLSGENGDEVKKE

SEQ ID NO: 1324 - protein, 255 aa, Homo sapiens
MARAQALVLALTFQLCAPETETPAAGCTFEEASDPAVPCEYSQAQYDDFQWEQVRIHPGTRAPADLPHGSYLMVNTSQHAPGQRAHVIFQSLSENDTHCVQFSYFLYSRDGHSPGTLGVYVRVNGGPLGSAVWNMTGSHGRQWHQAELAVSTFWPNEYQVLFEALISPDRRGYMGLDDILLLSYPCAKAPHFSRLGDVEVNAGQNASFQCMAAGRAAEAERFLLQRQSGALVPAAGVRHISHRRFLATFPLAAVS

SEQ ID NO: 1325 - protein, 424 aa, Homo sapiens
MSLVLLSLAALCRSAVPREPTVQCGSETGPSPEWMLQHDLIPGDLRDLRVEPVTTSVATGDYSILMNVSWVLRADASIRLLKATKICVTGKSNFQSYSCVRCNYTEAFQTQTRPSGGKWTFSYIGFPVELNTVYFIGAHNIPNANMNEDGPSMSVNFTSPGCLDHIMKYKKKCVKAGSLWDPNITACKKNEETVEVNFTTTPLGNRYMALIQHSTIIGFSQVFEPHQKKQTRASVVIPVTGDSEGATVQLTPYFPTCGSDCIRHKGTVVLCPQTGVPFPLDNNKSKPGGWLPLLLLSLLVATWVLVAGIYLMWRHERIKKTSFSTTTLLPPIKVLVVYPSEICFHHTICYFTEFLQNHCRSEVILEKWQKKKIAEMGPVQWLATQKKAADKVVFLLSNDVNSVCDGTCGKSEGSPSENSQDLFP

SEQ ID NO: 1326 - protein, 255 aa, Homo sapiens
MALSLWPLLLLLLLLLLLSFAVTLAPTGPHSLDPGLSFLKSLLSTLDQAPQGSLSRSRFFTFLANISSSFEPGRMGEGPVGEPPPLQPPALRLHDFLVTLRGSPDWEPMLGLLGDMLALLGQEQTPRDFLVHQAGVLGGLVEVLLGALVPGGPPTPTQPPCTRDGPSDCVLAADWLPSLLLLLEGTRWQALVQVQPSVDPTNATGLDGREAAPHFLQGLLGLLTPTGELGSKEALWGGLLRTVGAPLYAAFQEGL

SEQ ID NO: 1327 - protein, 255 aa, Homo sapiens
MRPSGTAGAALLALLAALCPASRALEEKKVCQGTSNKLTQLGTFEDHFLSLQRMFNNCEVVLGNLEITYVQRNYDLSFLKTIQEVAGYVLIALNTVERIPLENLQIIRGNMYYENSYALAVLSNYDANKTGLKELPMRNLQEILHGAVRFSNNPALCNVESIQWRDIVSSDFLSNMSMDFQNHLGSCQKCDPSCPNGSCWGAGEENCQKLTKIICAQQCSGRCRGKSPSDCCHNQCAAGCTGPRESDCLVCRKFR

SEQ ID NO: 1328 - protein, 730 aa, Homo sapiens
MPKNSKVVKRELDDDVTESVKDLLSNEDAADDAFKTSELIVDGQEEKDTDVEEGSEVEDERPAWNSKLQYILAQVGFSVGLGNVWRFPYLCQKNGGGAYLLPYLILLMVIGIPLFFLELSVGQRIRRGSIGVWNYISPKLGGIGFASCVVCYFVALYYNVIIGWSLFYFSQSFQQPLPWDQCPLVKNASHTFVEPECEQSSATTYYWYREALNISSSISESGGLNWKMTICLLAAWVMVCLAMIKGIQSSGKIIYFSSLFPYVVLICFLIRAFLLNGSIDGIRHMFTPKLEIMLEPKVWREAATQVFFALGLGFGGVIAFSSYNKRDNNCHFDAVLVSFINFFTSVLATLVVFAVLGFKANVINEKCITQNSETIMKFLKMGNISQDIIPHHINLSTVTAEDYHLVYDIIQKVKEEEFPALHLNSCKIEEELNKAVQGTGLAFIAFTEAMTHFPASPFWSVMFFLMLVNLGLGSMFGTIEGIVTPIVDTFKVRKEILTVICCLLAFCIGLIFVQRSGNYFVTMFDDYSATLPLLIVVILENIAVCFVYGIDKFMEDLKDMLGFAPSRYYYYMWKYISPLMLLSLLIASVVNMGLSPPGYNAWIEDKASEEFLSYPTWGLVVCVSLVVFAILPVPVVFIVRRFNLIDDSSGNLASVTYKRGRVLKEPVNLEGDDTSLIHGKIPSEMPSPNFGKNIYRKQSGSPTLDTAPNGRYGIGYLMADIMPDMPESDL

SEQ ID NO: 1329 - protein, 349 aa, Homo sapiens
NANSCPVDRTLFKCICIRAQFGGKILRKIPVENTKASEEEEDPTFCEVCGRSDREDRLLLCDGCDAGVPGSVCCQLPRQALSWLLYHMECLDPPLQEVPVDEWFCPECAAPGVVLAADAGPVSEEEVSLLLADVVPTTSRLRPRAGRTRAIARTRQSERVRATVNRNRISTARRVQHTPGRLGSSLLDEAIEAVATGLSTAVYQRPLTPRTPARRKRKTRRRKKVPGRKKTPSGPSAKSKSSATRSKKRQHRVKKRRGKKVKHPRVVTEQGLSLPLALAPSRGYGAGIIIVFAFLYLLSDLLMEMNISVAQTEDGVEASCFLRHTEGLRGGHVPPRNLPEAISWSGSQV

SEQ ID NO: 1330 - protein, 255 aa, Homo sapiens
LFFLFLLAAFSRAPIPMAVVRRELSCESYPIELRCPGTDVIMIESANYGRTDDKICDSDPAQMENIRCYLPDAYKIMSQRCNNRTQCAVVAGPDVFPDPCPGTYKYLEVQYECVPYTNCGKVNICGKLMEHESYSSSPLSAVLLSAVSVTCGQPRSANRDLSIHRKSPRRSGTNTMWIQKDDLMEKLKFSFFSFFVCVCVCVCVCQRFMSSFLAFEVLFDDILGLRLLAIVLNYCTTATNHFGFPSLSVLQRPTL

SEQ ID NO: 1331 - protein, 518 aa, Homo sapiens
MGALARALLLPLLAQWLLRAAPELAPAPFTLPLRVAAATNRVVAPTPGPGTPAERHADGLALALEPALASPAGAANFLAMVDNLQGDSGRGYYLEMLIGTPPQKLQILVDTGSSNFAVAGTPHSYIDTYFDTERSSTYRSKGFDVTVKYTQGSWTGFVGEDLVTIPKGFNTSFLVNIATIFESENFFLPGIKWNGILGLAYATLAKPSSSLETFFDSLVTQANIPNVFSMQMCGAGLPVAGSGTNGGSLVLGGIEPSLYKGDIWYTPIKEEWYYQIEILKLEIGGQSLNLDCREYNADKAIVDSGTTLLRLPQKVFDAVVEAVARASLIPEFSDGFWTGSQLACWTNSETPWSYFPKISIYLRDENSSRSFRITILPQLYIQPMMGAGLNYECYRFGISPSTNALVIGATVMEGFYVIFDRAQKRVGFAASPCAEIAGAAVSEISGPFSTEDVASNCVPAQSLSEPILWIVSYALMSVCGAILLVLIVLLLLPFRCQRRPRDPEVVNDESSLVRHRWK

SEQ ID NO: 1332 - protein, 255 aa, Homo sapiens
MQLKIMPKKKRLSAGRVPLILFLCQMISALEVPLDLVQPPTITQQSPKDYIIDPRENIVIQCEAKGKPPPSFSWTRNGTHFDIDKDPLVTMKPGTGTLIINIMSEGKAETYEGVYQCTARNERGAAVSNNIVVRPSRSPLWTKEKLEPITLQSGQSLVLPCRPPIGLPPPIIFWMDNSFQRLPQSERVSQGLNGDLYFSNVLPEDTREDYICYARFNHTQTIQQKQPISVKVISVDELNDTIAANLSDTEFYGAK

SEQ ID NO: 1333 - protein, 632 aa, Homo sapiens
MTAEKALPLGNGKAAEEARESEAPGGGCSSGGAAPARHPRVKRDKAVHERGHWNNKVEFVLSVAGEIIGLGNVWRFPYLCYKNGGGAFLIPYVVFFICCGIPVFFLETALGQFTSEGGITCWRKVCPLFEGIGYATQVIEAHLNVYYIIILAWAIFYLSNCFTTELPWATCGHEWNTENCVEFQKLNVSNYSHVSLQNATSPVMEFWEHRVLAISDGIEHIGNLRWELALCLLAAWTICYFCIWKGTKSTGKVVYVTATFPYIMLLILLIRGVTLPGASEGIKFYLYPDLSRLSDPQVWVDAGTQIFFSYAICLGCLTALGSYNNYNNNCYRDCIMLCCLNSGTSFVAGFAIFSVLGFMAYEQGVPIAEVAESGPGLAFIAYPKAVTMMPLSPLWATLFFMMLIFLGLDSQFVCVESLVTAVVDMYPKVFRRGYRRELLILALSVISYFLGLVMLTEGGMYIFQLFDSYAASGMCLLFVAIFECICIGWVYGSNRFYDNIEDMIGYRPPSLIKWCWMIMTPGICAGIFIFFLIKYKPLKYNNIYTYPAWGYGIGWLMALSSMLCIPLWICITVWKTEGTLPEKLQKLTTPSTDLKMRGKLGVSPRMVTVNDCDAKLKSDGTIAAITEKETHF

SEQ ID NO: 1334 - protein, 255 aa, Homo sapiens
MDLEAAKNGTAWRPTSAEGDFELGISSKQKRKKTKTVKMIGVLTLFRYSDWQDKLFMSLGTIMAIAHGSGLPLMMIVFGEMTDKFVDTAGNFSFPVNFSLSLLNPGKILEEEMTRYAYYYSGLGAGVLVAAYIQVSFWTLAAGRQIRKIRQKFFHAILRQEIGWFDINDTTELNTRLTDDISKISEGIGDKVGMFFQAVATFFAGFIVGFIRGWKLTLVIMAISPILGLSAAVWAKILSAFSDKELAAYAKAGAV

SEQ ID NO: 1335 - protein, 517 aa, Homo sapiens
PVNENMQVNKIKKNEDAKKRLSVERIYQKKTQLEHILLRPDTYIGSVELVTQQMWVYDEDVGINYREVTFVPGLYKIFDEILVNAADNKQRDPKMSCIRVTIDPENNLISIWNNGKGIPVVEHKVEKMYVPALIFGQLLTSSNYDDDEKKVTGGRNGYGAKLCNIFSTKFTVETASREYKKMFKQANWMDNMGRAGEMELKPFNGEDYTCITFQPDLSKFKMQSLDKDIVALMVRRAYDIAGSTKDVKVFLNGNKLPVKGFRSYVDMYLKDKLDETGNSLKVIHEQVNHRWEVCLTMSEKGFQQISFVNSIATSKVILFLNYMIYLYIYVFLLFLIYKGGRHVDYVADQIVTKLVDVVKKKNKGGVAVKAHQVKNHMWIFVNALIENPTFDSQTKENMTLQPKSFGSTCQLSEKFIKAAIGCGIVESILNWVKFKAQVQLNKKCSAVKHNRIKGIPKLDDANDAGGRNSTECTLILTEGDSAKTLAVSGLGVVGRDKYGVFPLRGKILNVREASHKQ

SEQ ID NO: 1336 - protein, 529 aa, Homo sapiens
GLPQPIVMEALDEAEGLKDSQREMPHTPTSPPSDPAQKPPPRGAGSHSLTVRSSLCLFAASQFLLACGVLWFSGYGHIWSQNATNLVSSLLTLLKQLEPTAWLDSGTWGVPSLLLVFLSVGLVLVTTLVWHLLRTPAEPPTPLPPEDRRQSVSRQPSFTYSEWMEEKIEDDFLDLDPVPETPVFDCVMDIKPEADPTSLTVKSMGLQERRGSNVSLTLDMCTPGCNEEGFGYLMSPREESAREYLLSASRVLQAEELHEKALDPFLLQAEFFEIPMNFVDPKEYDIPGLVRKNRYKTILPNPHSRVCLTSPDPDDPLSSYINANYIRGYGGEEKVYIATQGPIVSTVADFWRMVWQEHTPIIVMITNIEEMNEKCTEYWPEQVAYDGVEITVQKVIHTEDYRLRLISLKSGTEERGLKHYWFTSWPDQKTPDRAPPLLHLVREVEEAAQQGPHCAPIIVHCSAGIGRTGCFIATSICQQLRQEGVVDILKTTCQLRQDRGGMIQTCEQYQFVHHVMSLYEKQLSHQSPE

SEQ ID NO: 1337 - protein, 551 aa, Homo sapiens
MRDYDEVIAFLGEWGPFQRLIFFLLSASIIPNGFNGMSVVFLAGTPEHRCRVPDAANLSSAWRNNSVPLRLRDGREVPHSCSRYRLATIANFSALGLEPGRDVDLGQLEQESCLDGWEFSQDVYLSTVVTEWNLVCEDNWKVPLTTSLFFVGVLLGSFVSGQLSDRFGRKNVLFATMAVQTGFSFLQIFSISWEMFTVLFVIVGMGQISNYVVAFILGTEILGKSVRIIFSTLGVCTFFAVGYMLLPLFAYFIRDWRMLLLALTVPGVLCVPLWWFIPESPRWLISQRRFREAEDIIQKAAKMNNIAVPAVIFDSVEELNPLKQQKAFILDLFRTRNIAIMTIMSLLLWMLTSVGYFALSLDAPNLHGDAYLNCFLSALIEIPAYITAWLLLRTLPRRYIIAAVLFWGGGVLLFIQLVPVDYYFLSIGLVMLGKFGITSAFSMLYVFTAELYPTLVRNMAVGVTSTASRVGSIIAPYFVYLGAYNRMLPYIVMGSLTVLIGILTLFFPESLGMTLPETLEQMQKVKWFRSGKKTRDSMETEENPKVLITAF

SEQ ID NO: 1338 - protein, 317 aa, Homo sapiens
MRRASRDYTKYLRGSEEMGGGPGAPHEGPLHAPPPPAPHQPPAASRSMFVALLGLGLGQVVCSVALFFYFRAQMDPNRISEDGTHCIYRILRLHENADFQDTTLESQDTKLIPDSCRRIKQAFQGAVQKELQHIVGSQHIRAEKAMVDGSWLDLAKRSKLEAQPFAHLTINATDIPSGSHKVSLSSWYHDRGWAKISNMTFSNGKLIVNQDGFYYLYANICFRHHETSGDLATEYLQLMVYVTKTSIKIPSSHTLMKGGSTKYWSGNSEFHFYSINVGGFFKLRSGEEISIEVSNPSLLDPDQDATYFGAFKVRDID

SEQ ID NO: 1339 - protein, 310 aa, Homo sapiens
MGDNITSIREFLLLGFPVGPRIQMLLFGLFSLFYVFTLLGNGTILGLISLDSRLHAPMYFFLSHLAVVDIAYACNTVPRMLVNLLHPAKPISFAGRMMQTFLFSTFAVTECLLLVVMSYDLYVAICHPLRYLAIMTWRVCITLAVTSWTTGVLLSLIHLVLLLPLPFCRPQKIYHFFCEILAVLKLACADTHINENMVLAGAISGLVGPLSTIVVSYMCILCAILQIQSREVQRKAFRTCFSHLCVIGLVYGTAIIMYVGPRYGNPKEQKKYLLLFHSLFNPMLNPLICSLRNSEVKNTLKRVLGVERAL

SEQ ID NO: 1340 - protein, 658 aa, Homo sapiens
MDRGTLPLAVALLLASCSLSPTSLAETVHCDLQPVGPERGEVTYTTSQVSKGCVAQAPNAILEVHVLFLEFPTGPSQLELTLQASKQNGTWPREVLLVLSVNSSVFLHLQALGIPLHLAYNSSLVTFQEPPGVNTTELPSFPKTQILEWAAERGPITSAAELNDPQSILLRLGQAQGSLSFCMLEASQDMGRTLEWRPRTPALVRGCHLEGVAGHKEAHILRVLPGHSAGPRTVTVKVELSCAPGDLDAVLILQGPPYVSWLIDANHNMQIWTTGEYSFKIFPEKNIRGFKLPDTPQGLLGEARMLNASIVASFVELPLASIVSLHASSCGGRLQTSPAPIQTTPPKDTCSPELLMSLIQTKCADDAMTLVLKKELVAHLKCTITGLTFWDPSCEAEDRGDKFVLRSAYSSCGMQVSASMISNEAVVNILSSSSPQRKKVHCLNMDSLSFQLGLYLSPHFLQASNTIEPGQQSFVQVRVSPSVSEFLLQLDSCHLDLGPEGGTVELIQGRAAKGNCVSLLSPSPEGDPRFSFLLHFYTVPIPKTGTLSCTVALRPKTGSQDQEVHRTVFMRLNIISPDLSGCTSKGLVLPAVLGITFGAFLIGALLTAALWYIYSHTRSPSKREPVVAVAAPASSESSSTNHSIGSTQSTPCSTSSMA

SEQ ID NO: 1341 - protein, 297 aa, Homo sapiens
KRPSPPAPTAGCPGHGAALGGWEHGRGARAAASRAHRAVGRGRGPGAGLRAGARSRAAAAGTPGPGLAAGAAFQLLNLLGNVGLFLRSDPSIRGVMLAGRGLGQGWAYCYQCQSQVPPRSGHCSACRVCILRRDHHCRLLGRCVGFGNYRPFLCLLLHAAGVLLHVSVLLGPALSALLRAHTPLHMAALLLLPWLMLLTGRVSLAQFALAFVTDTCVAGALLCGAGLLFHGMLLLRGQTTWEWARGQHSYDLGPCHNLQAALGPRWALVWLWPFLASPLPGDGITFQTTADVGHTAS

SEQ ID NO: 1342 - protein, 255 aa, Homo sapiens
DDICDYFGVKIAMYFAWLGFYTSAMVYPAVFGSVLYTFTEADQTSRDVSCVVFALFNVIWSTLFLEEWKRRGAELAYKWGTLDSPGEAVEEPRPQFRGVRRISPITRAEEFYYPPWKRLLFQLLVSLPLCLACLVCVFLLMLGCFQLQELVLSVKGLPRLARFLPKVMLALLVSVSAEGYKKLAIWLNDMENYRLESAYEKHLIIKVVLFQFVNSYLSLFYIGFYLKDMERLKELLLVLSLSQSLERQLQAVLVP

SEQ ID NO: 1343 - protein, 560 aa, Homo sapiens
FLLILALTEALAFAIQEPSPRESLQVLPSGTPPGTMVTAPHSSTRHTSVVMLTPNPDGPPSQAAAPMATPTPRAEGHPPTHTISTIAATVTAPHSESSLSTGPAPAAMATTSSKPEGRPRGQAAPTILLTKPPGATSRPTTAPPRTTTRRPPRPPGSSRKGAGNSSRPVPPAPGGHSRSKEGQRGRNPSSTPLGQKRPLGKFQIYKGNFTGSVEPEPSTLTPRTPLWGYSSSPQPQTVAATTVPSNTSWAPTTTSLGPAKDKPGLRRAAQGGGSTFTSQGGTPDATAASGAPVSPQAAPVPSQRPHHGDPQDGPSHSDSWLTVTPGTSRPLSTSSGVFTAATGPTPAAFDTSVSAPSQGIPQGASTTPQAPTHPSRVSESTISGAKEETVATLTMTDRVPSPLSTVVSTATGNFLNRLVPAGTWKPGTAGNISHVAEGDKPQHRATICLSKMDIAWVILAISVPISSCSVLLTVCCMKRKKKTANPENNLSYWNNTITMDYFNRHAVELPREIQSLETSEDQLSEPRSPANGDYRDTGMVLVNPFCQETLFVGNDQVSEI

SEQ ID NO: 1344 - protein, 537 aa, Homo sapiens
MAWRGAGPSVPGAPGGVGLSLGLLLQLLLLLGPARGFGDEEERRCDPIRISMCQNLGYNVTKMPNLVGHELQTDAELQLTTFTPLIQYGCSSQLQFFLCSVYVPMCTEKINIPIGPCGGMCLSVKRRCEPVLKEFGFAWPESLNCSKFPPQNDHNHMCMEGPGDEEVPLPHKTPIQPGEECHSVGTNSDQYIWVKRSLNCVLKCGYDAGLYSRSAKEFTDIWMAVWASLCFISTAFTVLTFLIDSSRFSYPERPIIFLSMCYNIYSIAYIVRLTVGRERISCDFEEAAEPVLIQEGLKNTGCAIIFLLMYFFGMASSIWWVILTLTWFLAAGLKWGHEAIEMHSSYFHIAAWAIPAVKTIVILIMRLVDADELTGLCYVGNQNLDALTGFVVAPLFTYLVIGTLFIAAGLVALFKIRSNLQKDGTKTDKLERLMVKIGVFSVLYTVPATCVIACYFYEISNWALFRYSADDSNMAVEMLKIFMSLLVGITSGMWIWSAKTLHTWQKCSNRLVNSGKVKREKRGNGWVKPGKGSETVV

SEQ ID NO: 1345 - protein, 209 aa, Homo sapiens
MEGGGGSGNKTTGGLAGFFGAGGAGYSHADLAGVPLTGMNPLSPYLNVDPRYLVQDTDEFILPTGANKTRGRFELAFFTIGGCCMTGAAFGAMNGLRLGLKETQNMAWSKPRNVQILNMVTRQGALWANTLGSLALLYSAFGVIIEKTRGAEDDLNTVAAGTMTGMLYKCTGGLRGIARGGLTGLTLTSLYALYNNWEHMKGSLLQQSL

SEQ ID NO: 1346 - protein, 440 aa, Homo sapiens
MRPHLSPPLQQLLLPVLLACAAHSTGALPRLCDVLQVLWEEQDQCLQELSREQTGDLGTEQPVPGCEGMWDNISCWPSSVPGRMVEVECPRFLRMLTSRNGSLFRNCTQDGWSETFPRPNLACGVNVNDSSNEKRHSYLLKLKVMYTVGYSSSLVMLLVALGILCAFRRLHCTRNYIHMHLFVSFILRALSNFIKDAVLFSSDDVTYCDAHRAGCKLVMVLFQYCIMANYSWLLVEGLYLHTLLAISFFSERKYLQGFVAFGWGSPAIFVALWAIARHFLEDVGCWDINANASIWWIIRGPVILSILINFILFINILRILMRKLRTQETRGNEVSHYKRLARSTLLLIPLFGIHYIVFAFSPEDAMEIQLFFELALGSFQGLVVAVLYCFLNGEVQLEVQKKWQQWHLREFPLHPVASFSNSTKASHLEQSQGTCRTSII

SEQ ID NO: 1347 - protein, 255 aa, Homo sapiens
MASGRDERPPWRLGRLLLLMCLLLLGSSARAAHIKKAEATTTTTSAGAEAAEGQFDRYYHEEELESALREAAAAGLPGLARLFSIGRSVEGRPLWVLRLTAGLGSLIPEGDAGPDAAGPDAAGPLLPGRPQVKLVGNMHGDETVSRQVLIYLARELAAGYRRGDPRLVRLLNTTDVYLLPSLNPDGFERAREGDCGFGDGGPSGASGRDNSRGRDLNRSFPDQFSTGEPPALDEVPEVRALIEWIRRNKFVLSGN

SEQ ID NO: 1348 - protein, 532 aa, Homo sapiens
TKKRIAVIGGGVSGLSSIKCCVEEGLEPVCFERTDDIGGLWRFQENPEEGRASIYKSVIINTSKEMMCFSDYPIPDHYPNFMHNAQVLEYFRMYAKEFDLLKYIRFKTTVCSVKKQPDFATSGQWEVVTESEGKKEMNVFDGVMVCTGHHTNAHLPLESFPGIEKFKGQYFHSRDYKNPEGFTGKRVIIIGIGNSGGDLAVEISQTAKQVFLSTRRGAWILNRVGDYGYPADVLFSSRLTHFIWKICGQSLANKYLEKKINQRFDHEMFGLKPKHRALSQHPTLNDDLPNRIISGLVKVKGNVKEFTETAAIFEDGSREDDIDAVIFATGYSFDFPFLEDSVKVVKNKISLYKKVFPPNLERPTLAIIGLIQPLGAIMPISELQGRWATQVFKGLKTLPSQSEMMAEISKAQEEIDKRYVESQRHTIQGDYIDTMEELADLVGVRPNLLSLAFTDPKLALHLLLGPCTPIHYRVQGPGKWDGARKAILTTDDRIRKPLMTRVVERSSSMTSTMTIGKFMLALAFFAIIIAYF

SEQ ID NO: 1349 - protein, 255 aa, Homo sapiens
EDEVVLQCIATIHKEQRKFCLAAEGLGNRLCFLEPTSEAKYIPPDLCVCNFVLEQSLSVRALQEMLANTGENGGEGAAQGGGHRTLLYGHAVLLRHSFSGMYLTCLTTSRSQTDKLAFDVGLREHATGEACWWTIHPASKQRSEGEKVRIGDDLILVSVSSERYLHLSVSNGNIQVDASFMQTLWNVHPTCSGSSIEEGYLLGGHVVRLFHGHDECLTIPSTDQNDSQHRRIFYEAGGAGTRARSLWRVEPLRIS

SEQ ID NO: 1350 - protein, 255 aa, Homo sapiens
PEFLKQPTNIYAHESMDIVFECEVTGKPTPTVKWVKNGDMVIPSDYFKIVKEHNLQVLGLVKSDEGFYQCIAENDVGNAQAGAQLIILEHDVAIPTLPPTSLTSATTDHLAPATTGPLPSAPRDVVASLVSTRFIKLTWRTPASDPHGDNLTYSVFYTKEGIARERVENTSHPGEMQVTIQNLMPATVYIFRVMAQNKHGSGESSAPLRVETQPEVQLPGPAPNLRAYAASPTSITVTWETPVSGNGEIQNYKLY

SEQ ID NO: 1351 - protein, 255 aa, Homo sapiens
MAPPPPPVLPVLLLLAAAAALPAMGLRAAAWEPRVPGGTRAFALRPGCTYAVGAACTPRAPRELLDVGRDGRLAGRRRVSGAGRPLPLQVRLVARSAPTALSRRLRARTHLPGCGARARLCGTGARLCGALCFPVPGGCAAAQHSALAAPTTLPACRCPPRPRPRCPGRPICLPPGGSVRLRLLCALRRAAGAVRVGLALEAATAGTPSASPSPSPPLPPNLPEARAGPARRARRGTSGRGSLKFPMPNYQVALF

SEQ ID NO: 1352 - protein, 492 aa, Homo sapiens
MIITQTSHCYMTSLGILFLINILPGTTGQGESRRQEPGDFVKQDIGGLSPKHAPDIPDDSTDNITIFTRILDRLLDGYDNRLRPGLGDAVTEVKTDIYVTSFGPVSDTDMEYTIDVFFRQTWHDERLKFDGPMKILPLNNLLASKIWTPDTFFHNGKKSVAHNMTTPNKLLRLVDNGTLLYTMRLTIHAECPMHLEDFPMDVHACPLKFGSYAYTTAEVVYSWTLGKNKSVEVAQDGSRLNQYDLLGHVVGTEIIRSSTGEYVVMTTHFHLKRKIGYFVIQTYLPCIMTVILSQVSFWLNRESVPARTVFGVTTVLTMTTLSISARNSLPKVAYATAMDWFIAVCYAFVFSALIEFATVNYFTKRSWAWEGKKVPEALEMKKKTPAAPAKKTSTTFNIVGTTYPINLAKDTEFSTISKGAAPSASSTPTIIASPKATYVQDSPTETKTYNSVSKVDKISRIIFPVLFAIFNLVYWATYVNRESAIKGMIRKQ

SEQ ID NO: 1353 - protein, 255 aa, Homo sapiens
MVAAAAATEARLRRRTAATAALAGRSGGPHWDWDVTRAGRPGLGAGLRLPRLLSPPLRPRLLLLLLLLSPPLLLLLLPCEAEAAAAAAAVSGSAAAEAKECDRPCVNGGRCNPGTGQCVCPAGWVGEQCQHCGGRFRLTGSSGFVTDGPGNYKYKTKCTWLIEGQPNRIMRLRFNHFATECSWDHLYVYDGDSIYAPLVAAFSGLIVPERDGNETVPEVVATSGYALLHFFSDAAYNLTGFNITYSFDMCPNNCS

SEQ ID NO: 1354 - protein, 255 aa, Homo sapiens
MQLCIFCCCCILFYFDLYDFGRGYDFTIQENGLQIDQPPEIGNISIVRIIIMKNDNAEGIIEFDPKYTAFEVEEDVGLIMIPVVRLHGTYGYVTADFISQSSSASPGGVDYILHGSTVTFQHGQNLSFINISIIDDNESEFEEPIEILLTGATGGAVLGRHLVSRIIIAKSDSPFGVIRFLNQSKISIANPNSTMILSLVLERTGGLLGEIQVNWETVGPNSQEALLPQNRDIADPVSGLFYFGEGEGGVRTIIL

SEQ ID NO: 1355 - protein, 265 aa, Homo sapiens
MNMSVLTLQEYEFEKQFNENEAIQWMQENWKKSFLFSALYAAFIFGGRHLMNKRAKFELRKPLVLWSLTLAVFSIFGALRTGAYMVYILMTKGLKQSVCDQGFYNGPVSKFWAYAFVLSKAPELGDTIFIILRKQKLIFLHWYHHITVLLYSWYSYKDMVAGGGWFMTMNYGVHAVMYSYYALRAAGFRVSRKFAMFITLSQITQMLMGCVVNYLVFCWMQHDQCHSHFQNIFWSSLMYLSYLVLFCHFFFEAYIGKMRKTTKAE

SEQ ID NO: 1356 - protein, 255 aa, Homo sapiens
MRKRKISVCQQTWALLCKNFLKKWRMKRESLMEWLNSLLLLLCLYIYPHSHQVNDFSSLLTMDLGRVDTFNESRFSVVYTPVTNTTQQIMNKVASTPFLAGKEVLGLPDEESIKEFTANYPEEIVRVTFTNTYSYHLKFLLGHGMPAKKEHKDHTAHCYETNEDVYCEVSVFWKEGFVALQAAINAAIIEITTNHSVMEELMSVTGKNMKMHSFIGQSGVITDLYLFSCIISFSSFIYYASVNVTRERKRMKALM

SEQ ID NO: 1357 - protein, 731 aa, Homo sapiens
MDTSGHFHDSGVGDLDEDPKCPCPSSGDEQQQQQQQQQQQQPPPPAPPAAPQQPLGPSLQPQPPQLQQQQQQQQQQQQQQPPHPLSQLAQLQSQPVHPGLLHSSPTAFRAPPSSNSTAILHPSSRQGSQLNLNDHLLGHSPSSTATSGPGGGSRHRQASPLVHRRDSNPFTEIAMSSCKYSGGVMKPLSRLSASRRNLIEAETEGQPLQLFSPSNPPEIVISSREDNHAHQTLLHHPNATHNHQHAGTTASSTTFPKANKRKNQNIGYKLGHRRALFEKRKRLSDYALIFGMFGIVVMVIETELSWGLYSKDSMFSLALKCLISLSTIILLGLIIAYHTREVQLFVIDNGADDWRIAMTYERILYISLEMLVCAIHPIPGEYKFFWTARLAFSYTPSRAEADVDIILSIPMFLRLYLIARVMLLHSKLFTDASSRSIGALNKINFNTRFVMKTLMTICPGTVLLVFSISLWIIAAWTVRVCERYHDQQDVTSNFLGAMWLISITFLSIGYGDMVPHTYCGKGVCLLTGIMGAGCTALVVAVVARKLELTKAEKHVHNFMMDTQLTKRIKNAAANVLRETWLIYKHTKLLKKIDHAKVRKHQRKFLQAIHQLRSVKMEQRKLSDQANTLVDLSKMQNVMYDLITELNDRSEDLEKQIGSLESKLEHLTASFNSLPLLIADTLRQQQQQLLSAIIEARGVSVAVGTTHTPISDSPIGVSSTSFPTPYTSSSSC

SEQ ID NO: 1358 - protein, 255 aa, Homo sapiens
MVISLNSCLSFICLLLCHWIGTASPLNLEDPNVCSHWESYSVTVQESYPHPFDQIYYTSCTDILNWFKCTRHRVSYRTAYRHGEKTMYRRKSQCCPGFYESGEMCVPHCADKCVHGRCIAPNTCQCEPGWGGTNCSSACDGDHWGPHCTSRCQCKNGALCNPITGACHCAAGFRGWRCEDRCEQGTYGNDCHQRCQCQNGATCDHVTGECRCPPGYTGAFCEDLCPPGKHGPQCEQRCPCQNGGVCHHVTGECSC

SEQ ID NO: 1359 - protein, 613 aa, Homo sapiens
MGRGGGGLDVGGGGEGSRDRLSRDGLASWGAEPGGGGSGSGSSSPPSSSSCSSRNKYQPQSGSSGPSSHSPPAAMALQSQASEEAKGPWQEADQEQQEPVGSPEPESEPEPEPEPEPVPVPPPEPQPEPQPLPDPAPLPELEFESERVHEPEPTPTVETRGTARGFQPPEGGFGWVVVFAATWCNGSIFGIHNSVGILYSMLLEEEKEKNRQVEFQAAWVGALAMGMIFFCSPIVSIFTDRLGCRITATAGAAVAFIGLHTSSFTSSLSLRYFTYGILFGCGCSFAFQPSLVILGHYFQRRLGLANGVVSAGSSIFSMSFPFLIRMLGDKIKLAQTFQVLSTFMFVLMLLSLTYRPLLPSSQDTPSKRGVRTLHQRFLAQLRKYFNMRVFRQRTYRIWAFGIAAAALGYFVPYVHLMKYVEEEFSEIKETWVLLVCIGATSGLGRLVSGHISDSIPGLKKIYLQVLSFLLLGLMSMMIPLCRDFGGLIVVCLFLGLCDGFFITIMAPIAFELVGPMQASQAIGYLLGMMALPMIAGPPIAGLLRNCFGDYHVAFYFAGVPPIIGAVILFFVPLMHQRMFKKEQRDSSKDKMLAPDPDPNGELLPGSPNPEEPI

SEQ ID NO: 1360 - protein, 311 aa, Homo sapiens
MESALPAAGFLYWVGAGTVAYLALRISYSLFTALRVWGVGNEGVGPGLGEWAVVTGSTDGIGKSYAEEVAKHGMKVVLISRSKDKLDQVSSEIKEKFKVETRTIAVDFASEDIYDKIKTGLAGLEIGILVNNVGMSYEYPEYFLDVPDLDNVIKKMININILSVCKMTQLVLPGMVERSKGAILNISSGSGMLPVPLLTIYSATKTFVDFFSQCLHEEYRSKGVFVQSVLPYFVATKLAKIRKPTLDKPSPETFVKSAIKTVGLQSRTNGYLIHALMGSIISNLPSWIYLKIVMNMNKSTRAHYLKKTKKN

SEQ ID NO: 1361 - protein, 255 aa, Homo sapiens
MFRQFYLWTCLASGIILGSLFEICLGQYDDDCKLARGGPPATIVAIDEESRNGTILVDNMLIKGTAGGPDPTIELSLKDNVDYWVLMDPVKQMLFLNSTGRVLDRDPPMNIHSIVVQVQCINKKVGTIIYHEVRIVVRDRNDNSPTFKHESYYATVNELTPVGTTIFTGFSGDNGATDIDDGPNGQIEYVIQYNPDDPTSNDTFEIPLMLTGNIVLRKRLNYEDKTRYFVIIQANDRAQNLNERRTTTTTLTVDV

SEQ ID NO: 1362 - protein, 824 aa, Homo sapiens
MRQSLLFLTSVVPFVLAPRPPDDPGFGPHQRLEKLDSLLSDYDILSLSNIQQHSVRKRDLQTSTHVETLLTFSALKRHFKLYLTSSTERFSQNFKVVVVDGKNESEYTVKWQDFFTGHVVGEPDSRVLAHIRDDDVIIRINTDGAEYNIEPLWRFVNDTKDKRMLVYKSEDIKNVSRLQSPKVCGYLKVDNEELLPKGLVDREPPEELVHRVKRRADPDPMKNTCKLLVVADHRFYRYMGRGEESTTTNYLIELIDRVDDIYRNTSWDNAGFKGYGIQIEQIRILKSPQEVKPGEKHYNMAKSYPNEEKDAWDVKMLLEQFSFDIAEEASKVCLAHLFTYQDFDMGTLGLAYVGSPRANSHGGVCPKAYYSPVGKKNIYLNSGLTSTKNYGKTILTKEADLVTTHELGHNFGAEHDPDGLAECAPNEDQGGKYVMYPIAVSGDHENNKMFSNCSKQSIYKTIESKAQECFQERSNKVCGNSRVDEGEECDPGIMYLNNDTCCNSDCTLKEGVQCSDRNSPCCKNCQFETAQKKCQEAINATCKGVSYCTGNSSECPPPGNAEDDTVCLDLGKCKDGKCIPFCEREQQLESCACNETDNSCKVCCRDLSGRCVPYVDAEQKNLFLRKGKPCTVGFCDMNGKCEKRVQDVIERFWDFIDQLSINTFGKFLADNIVGSVLVFSLIFWIPFSILVHCVDKKLDKQYESLSLFHPSNVEMLSSMDSASVRIIKPFPAPQTPGRLQPAPVIPSAPAAPKLDHQRMDTIQEDPSTDSHMDEDGFEKDPFPNSSTAAKSFEDLTDHPVTRSEKAASFKLQRQNRVDSKETEC

SEQ ID NO: 1363 - protein, 657 aa, Homo sapiens
MRRAVCFPALCLLLNLHAAGCFSGNNDHFLAINQKKSGKPVFIYKHSQDIEKSLDIAPQKIYRHSYHSSSEAQVSKRHQIVNSAFPRPAYDPSLNLLAMDGQDLEVENLPIPAANVIVVTLQMDVNKLNITLLRIFRQGVAAALGLLPQQVHINRLIGKKNSIELFVSPINRKTGISDALPSEEVLRSLNINVLHQSLSQFGITEVSPEKNVLQGQHEADKIWSKEGFYAVVIFLSIFVIIVTCLMILYRLKERFQLSLRQDKEKNQEIHLSPITLQPALSEAKTVHSMVQPEQAPKVLNVVVDPQGRGAPEIKATTATSVCPSPFKMKPIGLQERRGSNVSLTLDMSSLGNIEPFVSIPTPREKVAMEYLQSASRILTRSQLRDVVASSHLLQSEFMEIPMNFVDPKEIDIPRHGTKNRYKTILPNPLSRVCLRPKNVTDSLSTYINANYIRGYSGKEKAFIATQGPMINTVDDFWQMVWQEDSPVIVMITKLKEKNEKCVLYWPEKRGIYGKVEVLVISVNECDNYTIRNLVLKQGSHTQHVKHYWYTSWPDHKTPDSAQPLLQLMLDVEEDRLASQGRGPVVVHCSAGIGRTGCFIATSIGCQQLKEEGVVDALSIVCQLRMDRGGMVQTSEQYEFVHHALCLYESRLSAETVQ

SEQ ID NO: 1364 - protein, 255 aa, Homo sapiens
WQETINQIDNKLEGILGDILLSAACIVYSGILTPEFRQLIVNKWETFCIENGISLSSKFSLIKVMAQKYEISRWHNQGLPHGQYSVENAILIKNGQQWPLLIDPHRQAHKWIRQMEGSRLQKLSIEDSNYTKKIENAMKTGGSVLLQNLLETLAPGLKAILKKDIYQKKGHYFIRVGDAEFEYNSNFRLYLSTEIDNPHFLPSVYNFVTMINFTVTFQGLQDQLLSTVVTHEVPHLEDQRSKLLESISLDAITLE

SEQ ID NO: 1365 - protein, 68 aa, Homo sapiens
MGADFQFCKRNYEHSLYSLLFVIVYVISEVICLSYSNVFKARESEKREEERKVFKLISFEFKMHIKYN

SEQ ID NO: 1366 - protein, 76 aa, Homo sapiens
MQESGCRLEHPSATKFRNHVMEGDWDKAENDLNELKPLVHSPHAIVVRGALEISQTLLGIIVVNTLLFLVSHLCLF

SEQ ID NO: 1367 - protein, 81 aa, Homo sapiens
MENLPGSYFILFLFFKSASRSANLELTCFSRKERLFFDRTFWLYRIIIKFFCFFFSLFVELENGFVLVFFLTNSFRSVFPA

SEQ ID NO: 1368 - protein, 653 aa, Homo sapiens
MKLLWQVTVHHHTWNAILLPFVYLTAQVWILCAAIAAAASAGPQNCPSVCSCSNQFSKVVCTRRGLSEVPQGIPSNTRYLNLMENNIQMIQADTFRHLHHLEVLQLGRNSIRQIEVGAFNGLASLNTLELFDNWLTVIPSGAFEYLSKLRELWLRNNPIESIPSYAFNRVPSLMRLDLGELKKLEYISEGAFEGLFNLKYLNLGMCNIKDMPNLTPLVGLEELEMSGNHFPEIRPGSFHGLSSLKKLWVMNSQVSLIERNAFDGLASLVELNLAHNNLSSLPHDLFTPLRYLVELHLHHNPWNCDCDILWLAWWLREYIPTNSTCCGRCHAPMHMRGRYLVEVDQASFQCSAPFIMDAPRDLNISEGRMAELKCRTPPMSSVKWLLPNGTVLSHASRHPRISVLNDGTLNFSHVLLSDTGVYTCMVTNVAGNSNASAYLNVSTAELNTSNYSFFTTVTVETTEISPEDTTRKYKPVPTTSTGYQPAYTTSTTVLIQTTRVPKQVAVPATDTTDKMQTSLDEVMKTTKIIIGCFVAVTLLAAAMLIVFYKLRKRHQQRSTVTAARTVEIIQVDEDIPAATSAAATAAPSGVSGEGAVVLPTIHDHINYNTYKPAHGAHWTENSLGNSLHPTVTTISEPYIIQTHTKDKVQETQI

SEQ ID NO: 1369 - protein, 374 aa, Homo sapiens
MKRQNVRTLSLIVCTFTYLLVGAAVFDALESDHEMREEEKLKAEEIRIKGKYNISSEDYRQLELVILQSEPHRAGVQWKFAGSFYFAITVITTIGYGHAAPGTDAGKAFCMFYAVLGIPLTLVMFQSLGERMNTFVRYLLKRIKKCCGMRNTDVSMENMVTVGFFSCMGTLCIGAAAFSQCEEWSFFHAYYYCFITLTTIGFGDYVALQTKGALQKKPLYVAFSFMYILVGLTVIGAFLNLVVLRFLTMNSEDERRDAEERASLAGNRNSMVIHIPEEPRPSRPRYKADVPDLQSVCSCTCYRSQDYGGRSVAPQNSFSAKLAPHYFHSISYKIEEISPSTLKNSLFPSPISSISPGLHSFTDHQRLMKRRKSV

SEQ ID NO: 1370 - protein, 503 aa, Homo sapiens
MTPSPLLLLLLPPLLLGAFPPAAAARGPPKMADKVVPRQVARLGRTVRLQCPVEGDPPPLTMWTKDGRTIHSGWSRFRVLPQGLKVKQVEREDAGVYVCKATNGFGSLSVNYTLVVLDDISPGKESLGPDSSSGGQEDPASQQWARPRFTQPSKMRRRVIARPVGSSVRLKCVASGHPRPDITWMKDDQALTRPEAAEPRKKKWTLSLKNLRPEDSGKYTCRVSNRAGAINATYKVDVIQRTRSKPVLTGTHPVNTTVDFGGTTSFQCKVRSDVKPVIQWLKRVEYAEGRHNSTIDVGGQKFVVLPTGDVWSRPDGSYLNKLLITRARQDDAGMYICLGANTMGYSFRSAFLTVLPDPKPPGPPVASSSSATSLPWPVVIGIPAGAVFILGTLLLWLCQAQKKPCTPAPAPPLPGHRPPGTARDRSGDKDLPSLAALSAGPGVGLCEEHGSPAAPQHLLGPGPVAGPKLYPKLYTDIHTHTHTHSHTHSHVEGKVHQHIHYQC

SEQ ID NO: 1371 - protein, 255 aa, Homo sapiens
GPRCSQPGETCLNGGKCEAANGTEACVCGGAFVGPRCQDPNPCLSTPCKNAGTCHVVDRRGVADYACSCALGFSGPLCLTPLDNACLTNPCRNGGTCDLLTLTEYKCRCPPGWSGKSCQQADPCASNPCANGGQCLPFEASYICHCPPSFHGPTCRQDVNECGQKPGLCRHGGTCHNEVGSYRCVCRATHTGPNCERPYVPCSPSPCQNGGTCRPTGDVTHECACLPGFTGQNCEENIDDCPGNNCKNGGACVDG

SEQ ID NO: 1372 - protein, 512 aa, Homo sapiens
MLLWSLLVIFDSLTLVAPSSVFEGDSIVLKCQGEQNWKIQKMAYHKDNKELSVFKKFSDFLIQSAVLSDSGNYFCSTKGQLFLWDKTSNIVKIKVQELFQRPVLTASSFQPIEGGPVSLKCETRLSPQRLDVQLQFCFFRENQVLGSGWSSSPELQISAVWSEDTGSYWCKAETVTHRIRKQSLQSQIHVQSNSHLLSYIHLGIPISNVSLEIRAPGGQVTEGQKLILLCSVAGGTGNVTFSWYREATGTSMGKKTQRSLSAELEIPAVKESDAGKYYCRADNGHVPIQSKVVNIPVRIPVSRPVLTLRSPGAQAAVGDLLELHCEALRGSPPILYQFYHEDVTLGNSSAPSGGGASFNLSLTAEHSGNYSCEANNGLGAQCSEAVPVSISGPDGYRRDLMTAGVLWGLFGVLGFTGVALLLYALFHKISGESSATNEPRGASRPNPQEFTYSSPTPDMEELQPVYVNVGSVDVDVVYSQVWSMQQPESSANIRTLLENKDSQVIYSSVKKS

SEQ ID NO: 1373 - protein, 58 aa, Homo sapiens
MKTQDDGVLPPYDVNQLLGWDLNLSLFLGLCLMLLLAGSCLPSPGITGLSHGSNREDR

SEQ ID NO: 1374 - protein, 338 aa, Homo sapiens
MAASQVLGEKINILSGETVKAGDRDPLGNDCPEQDRLPQRSWRQKCASYVLALRPWSFSASLTPVALGSALAYRSHGVLDPRLLVGCAVAVLAVHGAGNLVNTYYDFSKGIDHKKSDDRTLVDRILEPQDVVRFGVFLYTLGCVCAACLYYLSPLKLEHLALIYFGGLSGSFLYTGGIGFKYVALGDLIILITFGPLAVMFAYAIQVGSLAIFPLVYAIPLALSTEAILHSNNTRDMESDREAGIVTLAILIGPTFSYILYNTLLFLPYLVFSILATHCTISLALPLLTIPMAFSLERQFRSQAFNKLPQRTAKLNLLLGLFYVFGIILAPAGSLPKI

SEQ ID NO: 1375 - protein, 495 aa, Homo sapiens
MKKRKELNALIGLAGDSRRKKPKKGPSSHRLLRTEPPDSDSESSSEEEEEFGVVGNRSRFAKGDYLRCCKICYPLCGFVILAACVVACVGLVWMQVALKEDLDALKEKFRTMESNQKSSFQEIPKLNEELLSKQKQLEKIESGEMGLNKVWINITEMNKQISLLTSAVNHLKANVKSAADLISLPTTVEGLQKSVASIGNTLNSVHLAVEALQKTVDEHKKTMELLQSDMNQHFLKETPGSNQIIPSPSATSELDNKTHSENLKQDILYLHNSLEEVNSALVGYQRQNDLKLEGMNETVSNLTQRVNLIESDVVAMSKVEKKANLSFSMMGDRSATLKRQSLDQVTNRTDTVKIQSIKKEDSSNSQVSKLREKLQLISALTNKPESNRPPETADEEQVESFTSKPSALPKFSQFLGDPVEKAAQLRPISLPGVSSTEDLQDLFRKTGQDVDGKLTYQEIWTSLGSAMPEPESLRAFDSDGDGRYSFLELRVALGI

SEQ ID NO: 1376 - protein, 247 aa, Homo sapiens
MEGDCLSCMKYLMFVFNFFIFLGVACLLASIWVMVDPTGFREIVAANPLLLTGAYILLAMGGLLFLLGFLGCCGAVRENKCLLLFFFLFILIIFLAELSAAILAFIFRENLTREFFTKELTKHYQGNNDTDVFSATWNSVMITFGCCGVNGPEDFKFASVFRLLTLDSEEVPEACCRREPQSRDGVLLSREECLLGRSLFLNKQGCYTVILNTFETYVYLAGALAIGVLAIELFAMIFAMCLFRGIQ

SEQ ID NO: 1377 - protein, 395 aa, Homo sapiens
RYACGGDCIRLSRLLLRFAWERPWWPRSWRPESLLRPHPRAVTVTHAAQPGGKIVRGCGFSMSSSVKTPALEELVPGSEEKPKGRSPLSWGSLFGHRSEKIVFAKSDGGTDENVLTVTITETTVIESDLGVWSSRALLYLTLWFFFSFCTLFLNKYILSLLGGEPSMLGAVQMLSTTVIGCVKTLVPCCLYQHKARLSYPPNFLMTMLFVGLMRFATVVLGLVSLKNVAVSFAETVKSSAPIFTVIMSRMILGEYTGEAPWAPPLRLRPTIPGLHPWCPSLLPAMGLCREDHSEWCPHWQCLHFSHGHMCGGVLEPGVCQVFSHWHAEVRAGLCLVALTGVPFCLPHDVPVIGRSGKSFSYNQDVVLLLLTDGVLFHLQSVTAYALMGKISPVTF

SEQ ID NO: 1378 - protein, 409 aa, Homo sapiens
MEDPSGAREPRARPRERDPGRRPHPDQGRTHDRPRDRPGDPRRKRSSDGNRRRDGDRDPERDQERDGNRDRNRDRERERERERDPDLMCPRRDTHRDAGPRAGHGVWEKPRQSRTRDGARGLTWDAAAPPGPAPWAPEPPQPQRKGDPGRRRPESEPPSERYLPSTPRPGREEVEYYQSEAEGLLECHKCKYLCTGRGVVQIVEVVLNGMVLICIVASYFVLAGFSASFSSGGGFGNNYYSPFEGTELEQVRQLDQQYTILRSPLIYGGVAVSLGLGVLTMGVLLQGAKSRTMLSGKWLLTEAAFSLLAAVGYCTGIGVYLHVALQINSTDTCKTRERLYARKGLTWMDCQLAGTDGAAATFACLLVIMYGASVVLALRSYREQKRYKGSREQPGSYSDAPEYLWSGTL

SEQ ID NO: 1379 - protein, 372 aa, Homo sapiens [sequence omitted]

SEQ ID NO: 1380 - protein, 335 aa, Homo sapiens
MKLKLKNVFLAYFLVSIAGLLYALVQLGQPCDCLPPLRAAAEQLRQKDLRISQLQAELRRPPPAPAQPPEPEALPTIYVVTPTYARLVQKAELVRLSQTLSLVPRLHWLLVEDAEGPTPLVSGLLAASGLLFTHLVVLTPKAQRLREGEPGWVHPRGVEQRNKALDWLRGRGGAVGGEKDPPPPGTQGVVYFADDDNTYSRELFEEMRWTRGVSVWPVGLVGGLRFEGPQVQDGRVVGFHTAWEPSRPFPVDMAGFAVALPLLLDKPNAQFDSTAPRGHLESSLLSHLVDPKDLEPRAANCTRVLVWHTRTEKPKMKQEEQLQRQGRGSDPAIEV

SEQ ID NO: 1381 - protein, 219 aa, Homo sapiens
MALSWLQRVELALFAAAFLCGAVAAAAMTRTQGSFSGRCPLYGVATLNGSSLALSRPSAPSLCYFVAGASGLLALYCLLLLLFWIYSSCIEDSHRGAIGLRIALAISAIAVFLVLVSACILRFGTRSLCNSIISLNTTISCSEAQKIPWTPPGTALQFYSNLHNAETSSWVNLVLWCVVLVLQVVQWKSEATPYRPLERGDPEWSSETDALVGSRLSHS

SEQ ID NO: 1382 - protein, 279 aa, Homo sapiens
STAATATATANATATAAAAASTATVTTATATATTATATANATATAAAAATSTATVTTATATATTATATANATAAATATATPTATATATATAMQGPITITTTAITTVITITTIVTTTAITTVITIATITTTTTAITITTTITIITTVTTTTITTITTIITITTTTITTITVTTTTTITTVITTTTTTITTTTTVTTTTTVTTTIAITTITITVTTTTTAITITIITTTAITTVTTITTTTVTTITTTTITTAITITTTAITTTNCSLLGANSPAGQAGSS

SEQ ID NO: 1383 - protein, 862 aa, Homo sapiens [sequence omitted]

SEQ ID NO: 1384 - protein, 142 aa, Homo sapiens
MTVGARLRSKAESSLLRRGPRGRGRTEGDEEAAAILEHLEYADEAEAAAESGTSAADERGPGTRGARRVHFALLPERYEPLEEPAPSEQPRKRYRRKLKKYGKNVGKVIIKGCRYVVIGLQGFAAAYSAPFAVATSVVSFVR

SEQ ID NO: 1385 - protein, 107 aa, Homo sapiens
MASGAARWLVLAPVRSGALRSGPSLRKDGDVSAAWSGSGRSLVPSRSVIVTRSGAILPKPVKMSFGLLRVFSIVIPFLYVGTLISKNFAALLEEHDIFVPEDDDDDD

SEQ ID NO: 1386 - protein, 524 aa, Homo sapiens
MKVLGRSFFWVLFPVLPWAVQAVEHEEVAQRVIKLHRGRGVAAMQSRQWVRDSCRKLSGLLRQKNAVLNKLKTAIGAVEKDVGLSDEEKLFQVHTFEIFQKELNESENSVFQAVYGLQRALQGDYKDVVNMKESSRQRLEALREAAIKEETEYMELLAAEKHQVEALKNMQHQNQSLSMLDEILEDVRKAADRLEEEIEEHAFDDNKSVKGVNFEAVLRVEEEEANSKQNITKREVEDDLGLSMLIDSQNNQYILTKPRDSTIPRADHHFIKDIVTIGMLSLPCGWLCTAIGLPTMFGYIICGVLLGPSGLNSIKSIVQVETLGEFGVFFTLFLVGLEFSPEKLRKVWKISLQGPCYMTLLMIAFGLLWGHLLRIKPTQSVFISTCLSLSSTPLVSRFLMGSARGDKEGDIDYSTVLLGMLVTQDVQLGLFMAVMPTLIQAGASASSSIVVEVLRILVLIGQILFSLAAVFLLCLVIKKYLIGPYYRKLHMESKGNKEILILGISAFIFLMLTVILKLCVIYVI

SEQ ID NO: 1387 - protein, 507 aa, Homo sapiens
MGCWGRNRGRLLCMLALTFMFMVLEVVVSRVTSSLAMLSDSFHMLSDVLALVVALVAERFARRTHATQKNTFGWIRAEVMGALVNAIFLTGLCFAILLEAIERFIEPHEMQQPLVVLGVGVAGLLVNVLGLCLFHHHSGFSQDSGHGHSHGGHGHGHGLPKGPRVKSTRPGSSDINVAPGEQGPDQEETNTLVANTSNSNGLKLDPADPENPRSGDTVEVQVNGNLVREPDHMELEEDRAGQLNMRGVFLHVLGDALGSVIVVVNALVFYFSWKGCSEGDFCVNPCFPDPCKAFVEIINSTHASVYEAGPCWVLYLDPTLCVVMVCILLYTTYPLLKESALILLQTVPKQIDIRNLIKELRNVEGVEEVHELHVWQLAGSRIIATAHIKCEDPTSYMEVAKTIKDVFHNHGIHATTIQPEFASVGSKSSVVPCELACRTQCALKQCCGTLPQAPSGKDAEKTPAVSISCLELSNNLEKKPRRTKAENIPAVVIEIKNMPNKQPESSL

SEQ ID NO: 1388 - protein, 153 aa, Homo sapiens
MNVGVAHSEVNPNTRVMNSRGMWLTYALGVGLLHIVLLSIPFFSVPVAWTLTNIIHNLGMYVFLHAVKGTPFETPDQGKARLLTHWEQLDYGVQFTSSRKFFTISPIILYFLASFYTKYDPTHFILNTASLLSVLIPKMPQLHGVRIFGINKY

SEQ ID NO: 1389 - protein, 592 aa, Homo sapiens
MVPSSPAVEKQVPVEPGPDPELRSWRHLVCYLCFYGFMAQIRPGESFITPYLLGPDKNFTREQACTNEITPVLSYSYLAVLVPVFLLTDYLRYTPVLLLQGLSFVSVWLLLLLGHSVAHMQLMELFYSVTMAARIAYSSYIFSLVRPARYQRVAGYSRAAVLLGVFTSSVLGQLLVTVGRVSFSTLNYISLAFLTFSVVLALFLKRPKRSLFFNRDDRGRCETSASELERMNPGPGGKLGHALRVACGDSVLARMLRELGDSLRRPQLRLWSLWWVFNSAGYYLVVYYVHILWNEVDPTTNSARVYNGAADAASTLLGAITSFAAGFVKIRWARWSKLLIAGVTATQAGLVFLLAHTRHPSSIWLCYAAFVLFRGSYQFLVPIATFQIASSLSKELCALVFGVNTFFATIVKTIITFIVSDVRGLGLPVRKQFQLYSVYFLILSIIYFLGAMLDGLRHCQRGHHPRQPPAQGLRSAAEEKAAQALSVQDKGLGGLQPAQSPPLSPEDSLGAVGPASLEQRQSDPYLAQAPAPQAAEFLSPVTTPSPCTLCSAQASGPEAADETCPQLAVHPPGVSKLGLQCLPSDGVQNVNQ

SEQ ID NO: 1390 - protein, 242 aa, Homo sapiens
RPTEACVTLAQAATTSHLHNPQHTLHGTTAPAVLLRAKHKGSSEEASVGNPERVFMKVLQAQKKHMSIELTTEPEAASDSSGINLSVFGSDQFEIPLTHQLQSVIPNNDVRSFISHVIWTLKTDCSETYVQVTCAKLISRTGLLMRLLSEQQEVKASKAEWDTDQWKTKNYINESTEAQSEQKEQKSSELTKEVPGYGYNNKLILVISVTVILTILILIFCLIEMLQYILKIYFLKMNALGP

SEQ ID NO: 1391 - protein, 135 aa, Homo sapiens
GQVLALVLVAALWGGTQPLLKRASAGLQRVHEPTWAQQLLQEMKTLFLNTEYLMPFLLNQCGSLLYYLTLASTDLTLAVPICNSLAIIFTLIVGKALGEDIGGKRAVAGMVLTVIGISLCITSSVSKTQGQQSTL

SEQ ID NO: 1392 - protein, 255 aa, Homo sapiens
LQVINVDGTKRRTLLEDKLPHIFGFTLLGDFIYWTDWQRRSIERVHKVKASRDVIIDQLPDLMGLKAVNVAKVVGRSPRRSLSGTMICLFLKSSECCRASLAWILLLLVFSCLLSTCFLLVLSAGFPSLVASFGVVMNNMLRVDNSKFLSSLWVNIEFVTISRAFMNGSSVEHVVEFGLDYPEGMAVDWMGKNLYWADTGTNRIEVARLDGQFRQVLVWRDLDNPRSLALDPTKGYIYWTEWGGKPRIVRAFMDG

SEQ ID NO: 1393 - protein, 376 aa, Homo sapiens
VETARPLGVQRRQSADEGPPGVAGLRHEPPTVWLGSVAHRGTWVCAHRWFGPAVTRAAQAATMVKLLVAKILCMVGVFFFMLLGSLLPVKIIETDFEKAHRSKKILSLCNTFGGGVFLATCFNALLPAVREKLQKVLSLGHISTDYPLAETILLLGFFMTVFLEQLILTFRKEKPSFIDLETFNAGSDVGSDSEYESPFMGGARGHALYVEPHGHGPSLSVQGLSRASPVRLLSLAFALSAHSVFEGLALGLQEEGEKVVSLFVGVAVHETLVAVALGISMARSAMPLRDAAKLAVTVSAMIPLGIGLGLGIESAQGVPGSVASVLLQGLAGGTFLFITFLEILAKELEEKSDRLLKVLFLVLGYTVLAGMVFLKW

SEQ ID NO: 1394 - protein, 429 aa, Homo sapiens
MAAQGYGYYRTVIFSAMFGGYSLYYFNRKTFSFVMPSLVEEIPLDKDDLGFITSSQSAAYAISKFVSGVLSDQMSARWLFSSGLLLVGLVNIFFAWSSTVPVFAALWFLNGLAQGLGWPPCGKVLRKWFEPSQFGTWWAILSTSMNLAGGLGPILATILAQSYSWRSTLALSGALCVVVSFLCLLLIHNEPADVGLRNLDPMPSEGKKGSLKEESTLQELLLSPYLWVLSTGYLVVFGVKTCCTDWGQFFLIQEKGQSALVGSSYMSALEVGGLVGSIAAGYLSDRAMAKAGLSNYGNPRHGLLLFMMAGMTVSMYLFRVTVTSDSPKLWILVLGAVFGFSSYGPIALFGVIANESAPPNLCGTSHAIVGLMANVGGFLAGLPFSTIAKHYSWSTAFWVAEVICAASTAAFFLLRNIRTKMGRVSKKAE

SEQ ID NO: 1395 - protein, 472 aa, Homo sapiens
MAPPAARLALLSAAALTLAARPAPSPGLGPGPECFTANGADYRGTQNWTALQGGKPCLFWNETFQHPYNTLKYPNGEGGLGEHNYCRNPDGDVSPWCYVAEHEDGVYWKYCEIPACQMPGNLGCYKDHGNPPPLTGTSKTSNKLTIQTCISFCRSQRFKFAGMESGYACFCGNNPDYWKYGEAASTECNSVCFGDHTQPCGGDGRIILFDTLVGACGGNYSAMSSVVYSPDFPDTYATGRVCYWTIRVPGASHIHFSFPLFDIRDSADMVELLDGYTHRVLARFHGRSRPPLSFNVSLDFVILYFFSDRINQAQGFAVLYQAVKEELPQERPAVNQTVAEVITEQANLSVSAARSSKVLYVITTSPSHPPQTVPGSNSWAPPMGAGSHRVEGWTVYGLATLLILTVTAIVAKILLHVTFKSHRVPASGDLRDCHQPGTSGEIWSIFYKPSTSISIFKKKLKGQSQQDDRNPL

SEQ ID NO: 1396 - protein, 108 aa, Homo sapiens
LGPVPRGIISNTLDKMYKARVGSSKVTAVVRWKVSLRERTNEFVQLKLFKYIYSCHLSSQQLFPGDMAKGPGKCTGLSQGLSILLPKIFSPLVLGICFFSGSLLLLSW

SEQ ID NO: 1397 - protein, 255 aa, Homo sapiens
DIPLLPGSPRRLSPQAGSRGGQGPKHGQQCLKMPGPRAPGLQGGSNRDPGQPCGGESTRSSSVINNYLDANEPVSLEARLSRMHFHDSQRKVDYVLAYHYRKRGVHLAQGFPGHSLAIVSNGETGKEPHAGGPGDIELGPLDALEEERKEQREEFEHNLMEAGLELEKDLENKSQGSIFVRIHAPWQVLAREAEFLKIKVPTKKMYEIKAGGSIAKKFSAALQKLSSHLQPRVPEHSNNKMKNLSYPFSREKMYL

SEQ ID NO: 1398 - protein, 290 aa, Homo sapiens
ILTGNKVLMPCDAVLIEGSCVVDEGMLTGESIPVTKTPLPKMDSSVPWKTQSEADYKRHVLFCGTEVIQAKAACSGTVRAVVLQTGFNTAKGDLVRSILYPKPVNFQLYRDAIRFLLCLVGTATIGMIYTLCVYVLSGEPPEEVVRKALDVITIAVPPALPAALTTGIIYAQRRLKKRGIFCISPQRINVCGQLNLVCFDKTGTLTRDGLDLWGVVSCDRNGFQEVHSFASGQALPWGPLCAAMASCHSLILLDGTIQGDPLDLKMFEATTWVSLCSSENLRSFFNARAT

SEQ ID NO: 1399 - protein, 141 aa, Homo sapiens
MWVLGIAATFCGLFLLPGFALQIQCYQCEEFQLNNDCSSPEFIVNCTVNVQDMCQKEVMEQSAGIMYRKSCASSAACLIASAGYQSFCSPGKLNSVCISCCNTPLCNGPRPKKRGSSASALRPGLRTTILFLKLALFSAHC

SEQ ID NO: 1400 - protein, 460 aa, Homo sapiens
MAPGRAVAGLLLLAAAGLGGVAEGPGLAFSEDVLSVFGANLSLSAAQLQHLLEQMGAASRVGVPEPGQLHFNQCLTAEEIFSLHGFSNATQITSSKFSVICPAVLQQLNFHPCEDRPKHKTRPSHSEVWGYGFLSVTIINLASLLGLILTPLIKKSYFPKILTFFVGLAIGTLFSNAIFQLIPEAFGFDPKVDSYVEKAVAVFGGFYLLFFFERMLKMLLKTYGQNGHTHFGNDNFGPQEKTHQPKALPAINGVTCYANPAVTEANGHIHFDNVSVVSLQDGKKEPSSCTCLKGPKLSEIGTIAWMITLCDALHNFIDGLAIGASCTLSLLQGLSTSIAILCEEFPHELGDFVILLNAGMSTRQALLFNFLSACSCYVGLAFGILVGNNFAPNIIFALAGGMFLYISLADMFPEMNDMLREKVTGRKTDFTFFMIQNAGMLTGFTAILLITLYAGEIELE

SEQ ID NO: 1401 - protein, 795 aa, Homo sapiens
ALSDQTMETLLGGLLAFGMAFAVVDACPKYCVCQNLSESLGTLCPSKGLLFVPPDIDRRTVELRLGGNFIIHISRQDFANMTGLVDLTLSRNTISHIQPFSFLDLESLRSLHLDSNRLPSLGEDTLRGLVNLQHLIVNNNQLGGIADEAFEDFLLTLEDLDLSYNNLHGLPWDSVRRMVNLHQLSLDHNLLDHIAEGTFADLQKLARLDLTSNRLQKLPPDPIFARSQASALTATPFAPPLSFSFGGNPLHCNCELLWLRRLERDDDLETCGSPGGLKGRYFWHVREEEFVCEPPLITQHTHKLLVLEGQAATLKCKAIGDPSPLIHWVAPDDRLVGNSSRTAVYDNGTLDIFITTSQDSGAFTCIAANAAGEATAMVEVSIVQLPHLSNSTSRTAPPKSRLSDITGSSKTSRGGGGSGGGEPPKSPPERAVLVSEVTTTSALVKWSVSKSAPRVKMYQLQYNCSDDEVLIYRMIPASNKAFVVNNLVSGTGYDLCVLAMWDDTATTLTATNIVGCAQFFTKADYPQCQSMHSQILGGTMILVIGGIIVATLLVFIVILMVRYKVCNHEAPSKMAAAVSNVYSQTNGAQPPPPSSAPAGAPPQGPPKVVVRNELLDFTASLARASDSSSSSSLGSGEAAGLGRAPWRIPPSAPRPKPSLDRLMGAFASLDLKSQRKEELLDSRTPAGRGAGTSARGHHSDREPLLGPPAARARSLLPLPLEGKAKRSHSFDMGDFAAAAAGGVVPGGYSPPRKVSNIWTKRSLSVNGMLLPFEESDLVGARGTFGSSEWVMESTV

SEQ ID NO: 1402 - protein, 95 aa, Homo sapiens
MELVLVFLCSLLAPMVLASAAEKEKEMDPFHYDYQTLRIGGLVFAVVLFSVGILLILSRRCKCSFNQKPRAPGDEEAQVENLITANATEPQKAEN

SEQ ID NO: 1403 - protein, 255 aa, Homo sapiens
AAPRSFPLRLPRGDESAQRGGRRPPTLCALSPAPAAQPSPVRPAETMDTEDDPLLQDVWLEEEQEEEEATGETFLGAQKPGPQPGAGGQCCWRHWPLASRPPASGFWSTLGWAFTNPCCAGLVLFLGCSIPMALSAFMFLYYPPLDIDISYNAFEIRNHEASQRFDALTLALKSQFGSWGRNRRDLADFTSETLQRLISEQLQQLHLGNRSRQASRAPRVIPAASLGGPGPYRDTSAAQKPTANRSGRLRRETPP

SEQ ID NO: 1404 - protein, 255 aa, Homo sapiens
MARPVRGGLGAPRRSPCLLLLWLLLLRLEPVTAAAGPRAPCAAACTCAGDSLDCGGRGLAALPGDLPSWTRSLNLSYNKLSEIDPAGFEDLPNLQEVYLNNNELTAVPSLGAASSHVVSLFLQHNKIRSVEGSQLKAYLSLEVLDLSLNNITEVRNTCFPHGPPIKELNLAGNRIGTLELGAFDGLSRSLLTLRLSKNRITQLPVRAFKLPRLTQLDLNRNRIRLIEGLTFQGLNSLEVLKLQRNNISKLTDGAF

SEQ ID NO: 1405 - protein, 691 aa, Homo sapiens
MMRNHRIASSLCGDQVFSKKKKKKKKNNMAAKEKLEAVLNVALRVPSIMLLDVLYRWDVSSFFQQIQRSSLSNNPLFQYKYLALNMHYVGYILSVVLLTLPRQHLVQLYLYFLTALLLYAGHQISRDYVRSELEFAYEGPMYLEPLSMNRFTTALIGQLVVCTLCSCVMKTKQIWLFSAHMLPLLARLCLVPLETIVIINKFAMIFTGLEVLYFLGSNLLVPYNLAKSAYRELVQVVEVYGLLALGMSLWNQLVVPVLFMVFWLVLFALQIYSYFSTRDQPASRERLLFLFLTSIAECCSTPYSLLGLVFTVSFVALGVLTLCKFYLQGYRAFMNDPAMNRGMTEGVTLLILAVQTGLIELQVVHRAFLLSIILFIVVASILQSMLEIADPIVLALGASRDKSLWKHFRAVSLCLFLLVFPAYMAYMICQFFHMDFWLLIIISSSILTSLQVLGTLFIYVLFMVEEFRKEPVENMDDVIYYVNGTYRLLEFLVALCVVAYGVSETIFGEWTVMGSMIIFIHSYYNVWLRAQLGWKSFLLRRDAVNKIKSLPIATKEQLEKHNDICAICYQDMKSAVITPCSHFFHAGCLKKWLYVQETCPLCHCHLKNSSQLPGLGTEPVLQPHAGAEQNVMFQEGTEPPGQEHTPGTRIQEGSRDNNEYIARRPDNQEGAFDPKEYPHSAKDEAHPVESA

SEQ ID NO: 1406 - protein, 774 aa, Homo sapiens
MCARMAGRTTAAPRGPYGPWLCLLVALALDVVRVDCGQAPLDPKGLHVTAARPAQPTLWTAKLDRFKGSRHHTTLITCHRAGLTEPDSSSPLELSEFLWVDFVVENSTGGGVAVTRPVTWQLEYPGQAPEAEKDKMVWEILVSERDIRALIPLAKAEELVNTAPLTGVPQHVPVRLVTVDGGGALVEVTEHVGCESANTQVLQVSEACDAVFVAGKESRGARGVRVDFWWRRLRASLRLTVWAPLLPLRIELTDTTLEQVRGWRVPGPAEGPAEPAAEASDEAERRARGCHLQYQRAGVRFLAPFAAHPLDGGRRLTHLLGPDWLLDVSHLVAPHARVLDSRVASLEGGRVVVGREPGVTSIEVRSPLSDSILGEQALAVTDDKVSVLELRVQPVMGISLTLSRGTAHPGEVTATCWAQSALPAPKQEVALSLWLSFSDHTVAPAELYDRRDLGLSVSAEEPGAILPAEEQGAQLGVVVSGAGAEGLPLHVALHPPEPCRRGRHRVPLASGTAWLGLPPASTPAPALPSSPAWSPPATEATMGGKRQVAGSVGGNTGVRGKFERAEEEARKEETEAREEEEEEEEEMVPAPQHVTELELGMYALLGVFCVAIFIFLVNGVVFVLRYQRKEPPDSATDPTSPQPHNWVWLGTDQEELSRQLDRQSPGPPKGEGSCPCESGGGGEAPTLAPGPPGGTTSSSSTLARKEAGGRRKRVEFVTFAPAPPAQSPEEPVGAPAVQSILVAGEEDIRWVCEDMGLKDPEELRNYMERIRGSS

SEQ ID NO: 1407 - protein, 722 aa, Homo sapiens
MPLHQLGDKPLTFPSPNSAMENGLDHTPPSRRASPGTPLSPGSLRSAAHSPLDTSKQPLCQLWAEKHGARGTHEVRYVSAGQSVACGWWAFAPPCLQVLNTPKGILFFLCAAAFLQGMTVNGFINTVITSLERRYDLHSYQSGLIASSYDIAACLCLTFVSYFGGSGHKPRWLGWGVLLMGTGSLVFALPHFTAGRYEVELDAGVRTCPANPGAVCADSTSGLSRYQLVFMLGQFLHGVGATPLYTLGVTYLDENVKSSCSPVYIAIFYTAAILGPAAGYLIGGALLNIYTEMGRRTELTTESPLWVGAWWVGFLGSGAAAFFTAVPILGYPRQLPGSQRYAVMRAAEMHQLKDSSRGEASNPDFGKTIRDLPLSIWLLLKNPTFILLCLAGATEATLITGMSTFSPKFLESQFSLSASEAATLFGYLVVPAGGGGTFLGGFFVNKLRLRGSAVIKFCLFCTVVSLLGILVFSLHCPSVPMAGVTASYGGSLLPEGHLNLTAPCNAACSCQPEHYSPVCGSDGLMYFSLCHAGCPAATETNVDGQKVYRDCSCIPQNLSSGFGHATAGKCTSTCQRKPLLLVFIFVVIFFTFLSSIPALTATLRCVRDPQRSFALGIQWIVVRILGGIPGPIAFGWVIDKACLLWQDQCGQQGSCLVYQNSAMSRYILIMGLLYKVLGVLFFAIACFLYKPLSESSDGLETCLPSQSSAPDSATDSQLQSSV

SEQ ID NO: 1408 - protein, 149 aa, Homo sapiens
MTVQRLVAAAVLVALVSLILNNVAAFTSNWVCQTLEDGRRRSVGLWRSCWLVDRTRGGPSPGARAGQVDAHDCEALGWGSEAAGFQESRGTVKLQFDMMRACNLVATAALTAGQLTFLLGLVGLPLLSPDAPCWEEAMAAAFQLASKYL

SEQ ID NO: 1409 - protein, 324 aa, Homo sapiens
MAAAAPGNGRASAPRLLLLFLVPLLWAPAAVRAGPDEDLSHRNKEPPAPAQQLQPQPVAVQGPEPARVEKIFTPAAPVHTNKEDPATQTNLGFIHAFVAAISVIIVSELGDKTFFIAAIMAMRYNRLTVLAGAMLALGLMTCLSVLFGYATTVIPRVYTYYVSTVLFAIFGIRMLREGLKMSPDEGQEELEEVQAELKKKDEEFQRTKLLNGPGDVETGTSITVPQKKWLHFISPIFVQALTLTFLAEWGDRSQLTTIVLAAREDPYGVAVGGTVGHCLCTGLAVIGGRMIAQKISVRTVTIIGGIVFLAFAFSALFISPDSGF

SEQ ID NO: 1410 - protein, 254 aa, Homo sapiens
MPIKPVGWICGQVLKNFSGRIEGIQKAIMDLVDEFKDEFPTILRLSQSNQKREPAQKTSKIRMAIALAKINRATLIRGLNSISRSSKSVAKLLHPQLACRLLELRDISGRLLREVNAPRQPLYNIQVRKGSLFEIISFPAKTALTSIIYASYAALIYLAVCVNAVLKKVKNIFQEEESIRQNREESENCRKAFSEPVLSEPMFAEGEIKAKPYRSLPEKPDISDYPKLLANKQSNNIQVLHSVFDQSAEMNEQI

SEQ ID NO: 1411 - protein, 165 aa, Homo sapiens
MALLALLLVVALPRVWTDANLTARQRDPEDSQRTDEGDNRVWCHVCERENTFECQNPRRCKWTEPYCVIAAVKIFPRFFMVAKQCSAGCAAMERPKPEEKRFLLEEPMPFFYLKCCKIRYCNLEGPPINSSVFKEYAGSMGESCGGLWLAILLLLASIAAGLSLS

SEQ ID NO: 1412 - protein, 380 aa, Homo sapiens
MCPMLLKNGYNGNATPVTTTAPWASLGLSAKTCNNVSFEESRIVLVVVYSAVCTLGVPANCLTAWLALLQVLQGNVLAVYLLCLALCELLYTGTLPLWVIYIRNQHRWTLGLLACKVTAYIFFCNIYVSILFLCCISCDRFVAVVYALESRGRRRRRTAILISACIFILVGIVHYPVFQTEDKETCFDMLQMDSRIAGYYYARFTVGFAIPLSIIAFTNHRIFRSIKQSMGLSAAQKAKVKHSAIAVVVIFLVCFAPYHLVLLVKAAAFSYYRGDRNAMCGLEERLYTASVVFLCLSTVNGVADPIIYVLATDHSRQEVSRIHKGWKEWSMKTDVTRLTHSRDTEELQSPVALADHYTFSRPVHPPGSPCPAKRLIEESC

SEQ ID NO: 1413 - protein, 474 aa, Homo sapiens
MELGGHWDMNSAPRLVSETAERKQEQKTGTEAEAADSGAVGARRFLLCLYLVGFLDLFGVSMVVPLLSLHVKSLGASPTVAGIVGSSYGILQLFSSTLVGCWSDVVGRRSSLLACILLSALGYLLLGAATNVFLFVLARVPAGIFKHTLSISRALLSDVVPEKERPLVIGHFNTASGVGFILGPVVGGYLTELEDGFYLTAFICFLVFILNAGLVWFFPWREAKPGSTEKGLPLRKTHVLLGRSHDTVQEAATSRRARASKKTAQPWVEVVLALRNMKNLLFSEMWDIFLVRLLMAMAVMLYYSNFVLALEERFGVRPKVTGYLISYSSMLGAVAGLALGPILRLYKHNSQALLLHSSILTCTLLLLYSLAPTMGAVVLSSTLLSFSTAIGRTCITDLQLTVGGAQASGTLIGVGQSVTAVGRIIAPLLSGVAQEVSPCGPPSLGAVLALVAIFIMSLNKRHSSGDGNSKLKSE

SEQ ID NO: 1414 - protein, 323 aa, Homo sapiens
MEAKEKQHLLDARPAIRSYTGSLWQEGAGWIPLPRPGLDLQAIELAAQSNHHCHAQKGPDSHCDPKKGKAQRQLYVASAICLLFMIGEVVEILGALVSVLSIWVVTGVLVYLAVERLISGDYEIDGGTMLITSGCAVAVNIIMGLTLHQSGHGHSHGTTNQQEENPSVRAAFIHVIGDFMQSMGVLVAAYILYFKPEYKYVDPICTFVFSILVLGTTLTILRDVILVLMEGTPKGVDFTAVRDLLLSVEGVEALHSLHIWALTVAQPVLSVHIAIAQNTDAQAVLKTASSRLQGKFHFHTVTIQIEDYSEDMKDCQACQGPSD

SEQ ID NO: 1415 - protein, 270 aa, Homo sapiens
VLAVARGAPALLTCVNRGHVWTDRHVEEAQQVVHWDRQPPGVPHDRADRLLDLYASGERRAYGPLFLRDRVAVGADAFERGDFSLRIEPLEVADEGTYSCHLHHHYCGLHERRVFHLTVAEPHAEPPPRGSPGNGSSHSGAPGPDPTLARGHNVINVIVPESRAHFFQQLGYVLATLLLFILLLVTVLLAARRRRGGYEYSDQKSGKSKGKDVNLAEFAVAAGDQMLYRSEDIQLDYKNNILKERAELAHSPLPAKYIDLDKGFRKENCK

SEQ ID NO: 1416 - protein, 560 aa, Homo sapiens
MQGEAHPSASLIDRTIKMRKETEARKVVLAWGLLNVSMAGMIYTEMTGKLISSYYNVTYWPLWYIELALASLFSLNALFDFWRYFKYTVAPTSLVVSPGQQTLLGLKTAVVQTTPPHDLAATQIPPAPPSPSIQGQSVLSYSPSRSPSTSPKFTTSCMTGYSPQLQGLSSGGSGSYSPGVTYSPVSGYNKLASFSPSPPSPYPTTVGPVESSGLRSRYRSSPTVYNSPTDKEDYMTDLRTLDTFLRSEEEKQHRVKLGSPDSTSPSSSPTFWNYSRSMGDYAQTLKKFQYQLACRSQAPCANKDEADLSSKQAAEEVWARVAMNRQLLDHMDSWTAKFRNWINETILVPLVQEIESVSTQMRRMGCPELQIGEASITSLKQAALVKAPLIPTLNTIVQYLDLTPNQEYLFERIKELSQGGCMSSFRWNRGGDFKGRKWDTDLPTDSAIIMHVFCTYLDSRLPPHPKYPDGKTFTSQHFVQTPNKPDVTNENVFCIYQSAINPPHYELIYQRHVYNLPKGRNNMFHTLLMFLYIIKTKESGMLGRVNLGLSGVNILWIFGE

SEQ ID NO: 1417 - protein, 398 aa, Homo sapiens
MKHKRDDGPEKQEDEAVDVTPVMTCVFVVMCCSMLVLLYYFYDLLVYVVIGIFCLASATGLYSCLAPCVRRLPSASAGESALLAPTIPNNSLPYFHKRPQARMLLLALFCVAVSVVWGVFRNEDQWAWVLQDALGIAFCLYMLKTIRLPTFKACTLLLLVLFLYDIFFVFITPFLTKSGSSIMVEVATGPSDSATREKLPMVLKVPRLNSSPLALCDRPFSLLGFGDILVPGLLVAYCHRFDIQVQSSRVYFVACTIAYGVGLLVTFVALALMQRGQPALLYLVPCTLVTSCAVALWRRELGVFWTGSGFAKVLPPSPWAPAPADGPQPPKDSATPLSPQPPSEEPATSPWPAEQSPKSRTSEEMGAGAPMREPGSPAESEGRDQAQPSPVTQPGASA

SEQ ID NO: 1418 - protein, 361 aa, Homo sapiens
MSAGRASGALSRTRTPLEPEPQQKPEPEPNHRYRVGQVVRGLMSEPQPDLEPPQHGLYMLFLLVLVFFLMGLVGFMICHVLKKKGYRCRTSRGSEPDDAQLQPPEDDDMNEDTVERIVRCIIQNEANAEALKEMLGDSEGEGTVQLSSVDATSSLQDGAPSHHHTVHLGSAAPCLHCSRSKRPPLVRQGRSKEGKSRPRTGETTVFSVGRFRVTHIEKRYGLHEHRDGSPTDRSWGSGGGQDPGGGQGSGGGQPKAGMPAMERLPPERPQPQVLASPPVQNGGLRDSSLTPRALEGNPRASAEPTLRAGGRGPSPGLPTQEANGQPSKPDTSDHQPNPSDPGIQSGVGHGARVGKEVGQNY

SEQ ID NO: 1419 - protein, 301 aa, Homo sapiens
MLALRVARGSWGALRGAAWAPGTRPSKRRACWALLPPVPCCLGCLAERWRLRPAALGLRLPGIGQRNHCSGAGKAAPRPAAGAGAAAEAPGGQWGPASTPSLYENPWTIPNMLSMTRIGLAPVLGYLIIEEDFNIALGVFALAGLTDLLDGFIARNWANQRSALGSALDPLADKILISILYVSLTYADLIPVPLTYMIISRDVMLIAAVFYVRYRTLPTPRTLAKYFNPCYATARLKPTFISKVNTAVQLILVAASLAAPVFNYADSIYLQILWCFTAFTTAASAYSYYHYGRKTVQVIKD

SEQ ID NO: 1420 - protein, 443 aa, Homo sapiens
MECLRSLPCLLPRAMRLPRRTLCALALDVTSVGPPVAACGRRANLIGRSRAAQLCGPDRLRVAGEVHRFRTSDVSQATLASVAPVFTVTKFDKQGNVTSFERKKTELYQELGLQARDLRFQHVMSITVRNNRIIMRMEYLKAVITPECLLILDYRNLNLEQWLFRELPSQLSGEGQLVTYPLPFEFRAIEALLQYWINTLQGKLSILQPLILETLDALVDPKHSSVDRSKLHILLQNGKSLSELETDIKIFKESILEILDEEELLEELCVSKWSDPQVFEKSSAGIDHAEEMELLLENYYRLADDLSNAARELRVLIDDSQSIIFINLDSHRNVMMRLNLQLTMGTFSLSLFGLMGVAFGMNLESSLEEDHRIFWLITGIMFMGSGLIWRRLLSFLGRQLEAPLPPMMASLPKKTLLADRSMELKNSLRLDGLGSGRSILTNR

SEQ ID NO: 1421 - protein, 538 aa, Homo sapiens
MPVPWFLLSLALGRSPVVLSLERLVGPQDATHCSPGLSCRLWDSDILCLPGDIVPAPGPVLAPTHLQTELVLRCQKETDCDLCLRVAVHLAVHGHWEEPEDEEKFGGAADSGVEEPRNASLQAQVVLSFQAYPTARCVLLEVQVPAALVQFGQSVGSVVYDCFEAALGSEVRIWSYTQPRYEKELNHTQQLPALPWLNVSADGDNVHLVLNVSEEQHFGLSLYWNQVQGPPKPRWHKNLTGPQIITLNHTDLVPCLCIQVWPLEPDSVRTNICPFREDPRAHQNLWQAARLQLLTLQSWLLDAPCSLPAEAALCWRAPGGDPCQPLVPPLSWENVTVDKVLEFPLLKGHPNLCVQVNSSEKLQLQECLWADSLGPLKDDVLLLETRGPQDNRSLCALEPSGCTSLPSKASTRAARLGEYLLQDLQSGQCLQLWDDDLGALWACPMDKYIHKRWALVWLACLLFAAALSLILLLKKDHAKGWLRLLKQDVRSGGEWEQALGGGPPPGSQACASSPLPSPSVFSGSGRQGPRGSAPLLSR

SEQ ID NO: 1422 - protein, 255 aa, Homo sapiens
MAPAPLGVPEEQLLGCRSRVLSRLLFIAQTALLLLPAAGAGLCPAPCSCRIPLLDCSRRKLPAPSWRALSGLLPPDTAILDFSHNRLSNWNISLESQTLQEVKMNYNELTEIPYFGEPTSNITLLSLVHNIIPEINAQALQFYPALESLDLSSNIISEIKTSSFPRMQLKYLNLSNNRITTLEAGCFDNLSSSLLVVKLNRNRMSMIPPKIFKLPHLQFLELKRNRIKIVEGLTFQGLDSLRSLKMQRNGISKLK

SEQ ID NO: 1423 - protein, 379 aa, Homo sapiens
MAWRGWAQRGWGCGQAWGASVGGRSCEELTAVLTPPQLLGRRFNFFIQQKCGFRKAPRKVEPRRSDPGTSGEAYKRSALIPPVEETVFYPSPYPIRSLIKPLFFTVGFTGCAFGSAAIWQYESLKSRVQSYFDGIKADWLDSIRPQKEGDFRKEINKWWNNLSDGQRTVTGIIAANVLVFCLWRVPSLQRTMIRYFTSNPASKVLCSPMLLSTFSHFSLFHMAANMYVLWSFSSSIVNILGQEQFMAVYLSAGVISNFVSYVGKVATGRYGPSLGASGAIMTVLAAVCTKIPEGRLAIIFLPMFTFTAGNALKAIIAMDTAGMILGWKFFDHAAHLGGALFGIWYVTYGHELIWKNREPLVKIWHEIRTNGPKKGGGSK

SEQ ID NO: 1424 - protein, 194 aa, Homo sapiens
SRPAAPLLHGPVCQRCFGSPPVRPGHAQTLRSSSLSLGMAGQFRSYVWDPLLILSQIVLMQTVYYGSLGLWLALVDGLVRSSPSLDQMFDAEILGFSTPPGRLSMMSFILNALTCALGLLYFIRRGKQCLDFTVTVHFFHLLGCWFYSSRFPSALTWWLVQAVCIALMAVIGEYLCMRTELKEIPLNSAPKSNV

SEQ ID NO: 1425 - protein, 417 aa, Homo sapiens
MARAMAAAWPLLLVALLVLSWPPPGTGDVVVQAPTQVPGFLGDSVTLPCYLQVPNMEVTHVSQLTWARHGESGSMAVFHQTQGPSYSESKRLEFVAARLGAELRNASLRMFGLRVEDEGNYTCLFVTFPQGSRSVDIWLRVLAKPQNTAEVQKVQLTGEPVPMARCVSTGGRPPAQITWHSDLGGMPNTSQVPGFLSGTVTVTSLWILVPSSQVDGKNVTCKVEHESFEKPQLLTVNLTVYYPPEVSISGYDNNWYLGQNEATLTCDARSNPEPTGYNWSTTMGPLPPFAVAQGAQLLIRPVDKPINTTLICNVTNALGARQAELTVQVKEGPPSEHSGISRNAIIFLVLGILVFLILLGIGIYFYWSKCSREVLWHCHLCPSSTEHASASANGHVSYSAVSRENSSSQDPQTEGTR

SEQ ID NO: 1426 - protein, 356 aa, Homo sapiens
MGQPPAEEAEQPGALAREFLAAMEPEPAPAPAPEEWLDILGNGLLRKKTLVPGPPGSSRPVKGQVVTVHLQTSLENGTRVQEEPELVFTLGDCDVIQALDLSVPLMDVGETAMVTADSKYCYGPQGSRSPYIPPHAALCLEVTLKTAVDGPDLEMLTGQERVALANRKRECGNAHYQRADFVLAANSYDLAIKAITSSAKVDMTFEEEAQLLQLKVKCLNNLAASQLKLDHYRAALRSCSLVLEHQPDNIKALFRKGKVLAQQGEYSEAIPILRAALKLEPSNKTIHAELSKLVKKHAAQRSTETALYRKMLGNPSRLPAKCPGKGAWSIPWKWLFGATAVALGGVALSVVIAARN

SEQ ID NO: 1427 - protein, 333 aa, Homo sapiens
MESSGNPESTTFFYYDLQSQPCENQAWVFATLATTVLYCLVFLLSLVGNSLVLWVLVKYESLESLTNIFILNLCLSDLVFACLLPVWISPYHWGWVLGDFLCKLLNMIFSISLYSSIFFLTIMTIHRYLSVVSPLSTLRVPTLRCRVLVTMAVWVASILSSILDTIFHKVLSSGCDYSELTWYLTSVYQHNLFFLLSLGIILFCYVEILRTLFRSRSKRRHRTVKLIFAIVVAYFLSWGPYNFTLFLQTLFRTQIIRSCEAKQQLEYALLICRNLAFSHCCFNPVLYVFVGVKFRTHLKHVLRQFWFCRLQAPSPASIPHSPGAFAYEGASFY

SEQ ID NO: 1428 - protein, 300 aa, Homo sapiens
MDLPPQLSFGLYVAAFALGFPLNVLAIRGATAHARLRLTPSLVYALNLGCSDLLLTVSLPLKAVEALASGAWPLPASLCPVFAVAHFFPLYAGGGFLAALSAGRYLGAAFPLGYQAFRRPCYSWGVCAAIWALVLCHLGLVFGLEAPGGWLDHSNTSLGINTPVNGSPVCLEAWDPASAGPARFSLSLLLFFLPLAITAFCYVGCLRALARSGLTHRRKLRAAWVAGGALLTLLLCVGPYNASNVASFLYPNLGGSWRKLGLITGAWSVVLNPLVTGYLGRGPGLKTVCAARTQGGKSQK

SEQ ID NO: 1429 - protein, 346 aa, Homo sapiens
MDTGPDQSYFSGNHWFVFSVYLLTFLVGLPLNLLALVVFVGKLQRRPVAVDVLLLNLTASDLLLLLFLPFRMVEAANGMHWPLPFILCPLSGFIFFTTIYLTALFLAAVSIERFLSVAHPLWYKTRPRLGQAGLVSVACWLLASAHCSVVYVIEFSGDISHSQGTNGTCYLEFRKDQLAILLPVRLEMAVVLFVVPLIITSYCYSRLVWILGRGGSHRRQRRVAGLLAATLLNFLVCFGPYNVSHVVGYICGESPAWRIYVTLLSTLNSCVDPFVYYFSSSGFQADFHELLRRLCGLWGQWQQESSMELKEQKGGEEQRADRPAERKTSEHSQGCGTGGQVACAES

SEQ ID NO: 1430 - protein, 296 aa, Homo sapiens
MSACGRKALTLLSSVFAVCGLGLLGIAVSTDYWLYLEEGVIVPQNQSTEIKMSLHSGLWRVCFLAGEERGRCFTIEYVMPMNTQLTSESTVNVLKMIRSATPFPLVSLFFMFIGFILNNIGHIRPHRTILAFVSGIFFILSGLSLVVGLVLYISSINDEMLNRTKDAETYFNYKYGWSFAFAAISFLLTEVKPVTLSMDRLGLGTAPLSRGEWGWGRRDIPQPFWTPDHPLYFPSSSQNVSLSYLSGSPPARMSPGPCSCPHVHFPPHSSCVLCRPQPREMRQAPAASPSSAVFSL

SEQ ID NO: 1431 - protein, 297 aa, Homo sapiens
MDCQENEYWDQWGRCVTCQRCGPGQELSKDCGYGEGGDAYCTACPPRRYKSSWGHHRCQSCITCAVINRVQKVNCTATSNAVCGDCLPRFYRKTRIGGLQDQECIPCTKQTPTSEVQCAFQLSLVEADTPTVPPQEATLVALVSSLLVVFTLAFLGLFFLYCKQFFNRHCQRGGLLQFEADKTAKEESLFPVPPSKETSAESQVSENIFQTQPLNPILEDDCSSTSGFPTQESFTMASCTSESHSHWVHSPIECTELDLQKFSSSASYTGAETLGGNTVESTGDRLELNVPFEVPSP

SEQ ID NO: 1432 - protein, 382 aa, Homo sapiens
MAVLFLLLFLCGTPQAADNMQAIYVALGEAVELPCPSPSTLHGDEHLSWFCSPAAGSFTTLVAQVQVGRPAPDPGKPGRESRLRLLGNYSLWLEGSKEEDAGRYWCAVLGQHHNYQNWRVYDVLVLKGSQLSARAADGSPCNVLLCSVVPSRRMDSVTWQEGKGPVRGRVQSFWGSEAALLLVCPGEGLSEPRSRRPRIIRCLMTHNKGVSFSLAASIDASPALCAPSTGWDMPWILMLLLTMGQGVVILALSIVLWRQRVRGAPGRGNRMRCYNCGGSPSSSCKEAVTTCGEGRPQPGLEQIKLPGNPPVTLIHQHPACVAAHHCNQVETESVGDVTYPAHRDCYLGDLCNSAVASHVAPAGILAAAATALTCLLPGLWSG

SEQ ID NO: 1433 - protein, 128 aa, Homo sapiens
MGTSSIFLCVLFLCGALGLTMSPARGRLRCYICGFTKPCHPVPTECRDDEACGISIGTSVKKLPLKGPVPSARLCHLLAALLHSVAPLLRAGPVQHSRFPTAAHQPPRLPAPLCGQLRWERTPPPLAS

SEQ ID NO: 1434 - protein, 237 aa, Homo sapiens
MAVFLQLLPLLLSRAQGNPGASLDGRPGDRVNLSCGGVSHPIRWVWAPSFPACKGLSKGRRPILWASSSGTPTVPPLQPFVGRLRSLDSGIRRLELLLSAGDSGTFFCKGRHEDESRTVLHVLGDRTYCKAPGPTHGSVYPQLLIPLLGAGLVLGLGALGLVWWLHRRLPPQPIRPLPRFALSPPHSSTCENRAPEASKGGRAQDSRGPGPGTEPALCGSGPSSPQQAPPAVHSGPC

SEQ ID NO: 1435 - protein, 766 aa, Homo sapiens
MVSWGRFICLVVVTMATLSLARPSFSLVEDTTLEPEEPPTKYQISQPEVYVAAPGESLEVRCLLKDAAVISWTKDGVHLGPNNRTVLIGEYLQIKGATPRDSGLYACTASRTVDSETWYFMVNVTDAISSGDDEDDTDGAEDFVSENSNNKRAPYWTNTEKMEKRLHAVPAANTVKFRCPAGGNPMPTMRWLKNGKEFKQEHRIGGYKVRNQHWSLIMESVVPSDKGNYTCVVENEYGSINHTYHLDVVERSPHRPILQAGLPANASTVVGGDVEFVCKVYSDAQPHIQWIKHVEKNGSKYGPDGLPYLKVLKHSGINSSNAEVLALFNVTEADAGEYICKVSNYIGQANQSAWLTVLPKQQAPGREKEITASPDYLEIAIYCIGVFLIACMVVTVILCRMKNTTKKPDFSSQPAVHKLTKRIPLRRQVSAESSSSMNSNTPLVRITTRLSSTADTPMLAGVSEYELPEDPKWEFPRDKLTLGKPLGEGCFGQVVMAEAVGIDKDKPKEAVTVAVKMLKDDATEKDLSDLVSEMEMMKMIGKHKNIINLLGACTQDGPLYVIVEYASKGNLREYLRARRPPGMEYSYDINRVPEEQMTFKDLVSCTYQLARGMEYLASQKCIHRDLAARNVLVTENNVMKIADFGLARDINNIDYYKKTTNGRLPVKWMAPEALFDRVYTHQSDVWSFGVLMWEIFTLGGSPYPGIPVEELFKLLKEGHRMDKPANCTNELYMMMRDCWHAVPSQRPTFKQLVEDLDRILTLTTNE

SEQ ID NO: 1436 - protein, 255 aa, Homo sapiens
WHLFGWSGTGVCECGEGFSGTACETCTEGKYGIHCDQACSCVHGRCNQGPLGDGSCDCDVGWRGVHCDNATTEDNCNGTCHTSANCLTNSDGTASCKCAAGFQGNGTICTAINACEISNGGCSAKADCKRTTPGRRVCTCKAGYTGDGIVCLEINPCLENHGGCDKNAECTQTGPNQAACNCLPAYTGDGKVCTLINVCLTKNGGCSEFAICNHTGQVERTCTCKPNYIGDGFTCRGSIYQELPKNPKTSQYFFQ

SEQ ID NO: 1437 - protein, 371 aa, Homo sapiens
MRVRWMLFWLLFGLLLEFISHQCISVSLLKTIFWSRNGHDGSTDVQQRAWRSNRRRQEGLRSICMHTKKRVSSFRGNKIGLKDVITLRRHVETKVRAKIRKRKVTTKINHHDKINGKRKTARKQKMFQRAQELRRRAEDYHKCKIPPSARKALCNWVRMAAAEHRHSSGLPYWPYLTAETLKNRMGHQPPPPTQQHSITDNSLSLKTPPECLLTPLPPSADDNLKTPPECVLTPLPPSADDNLKTPPECVLTPLPPSADDNLKTPPECLLTPLPPSADDNLKTPPECLLTPLPPSALPSAPPSADDNLKTRAEAADVEPSSPEPKRRRVGDVEPSRKPKRRRAADVEPSSPEPKRRRVGDVEPSRKPKRRR

SEQ ID NO: 1438 - protein, 463 aa, Homo sapiens
TFTVEDAVETIGFGRFHIALFLIMGSTGVVEAMEIMLIAVVSPVIRCEWQLENWQVALVTTMVFFGYMVFSILFGLLADRYGRWKILLISFLWGAYFSLLTSFAPSYIWFVFLRTMVGCGVSGHSQGRNFNLSKNIYFSFFFFIVIIPQRTLILDFSLPVFWLAGSLLIIGLASVIIPTIGWRWLIRVASIPGIILIVAFKFIPESARFNVSTGNTRAALATLERVAKMNRSVMPEGKLVEPVLEKRGRFADLLDAKYLRTTLQIWVIWLGISFAYYGVILASAELLERDLVCGSKSDSAVVVTGGDSGESQSPCYCHMFAPSDYRTMIISTIGEIALNPLNILGINFLGRRLSLSITMGCTALFFLLLNICTSSAGLIGFLFMLRALVAANFNTVYIYTAEVYPTTMRALGMGTSGSLCRIGAMVAPFISQVLMSASILGALCLFSSVCVVCAISAFTLPIE

SEQ ID NO: 1439 - protein, 502 aa, Homo sapiens
MSFEELCYKNPKMAIQKISDDYKIYCEKAPKIGKYFKMEIIKETKTVSRSNRKMSLLKRTLVRKPSMRPRNLTEVLLNTQHLEFFREFLKERKAKIPLQFLTAVQKISIETNEKICKSLIENVIKTFFQGQLSPEEMLQCDAPIIKEIASMRHVTTSTLLTLQGHVMKSIEEKWFKDYQDLFPPHHQEVEVQSEVQISSRKPSKIVSTYLQESQKKGWMRMISFIRSFCKYRRFMLNPSKRQEFEDYLHQEMQNSKENFTTAHNTSGRSAPPSTNVRSADQENGEITLVKRRIFGHRIITVNFAINDLYFFSEMEKFNDLVSSAHMLQVNRAYNENDVILMRSKMNIIQKLFLNSDIPPKLRVNVPEFQKDAILAAITEGYLDRSVFHGAIMSVFPVVMYFWKRFCFWKATRSYLQYRGKKFKDRKSPPKSTDKYPFSSGGDNAILRFTLLRGIEWLQPQREAISSVQNSSSSKLTQPRLVVSAMQLHPVQGQKLSYIKKEK

SEQ ID NO: 1440 - protein, 299 aa, Homo sapiens
  VARIANT 174: Xaa = Any Amino Acid
VINTLADHHHCGTGFRGSPWLHFIIAFPRSYKVFIILWTVYLWTILWSRNGHDGSTDVQQRAWRSNRCRQKGNKIGLKDVITLWRHVETKVRAKIRKRKVTTKINHHDKINGKRKTAKNQKLSMKECEHAEKERQVSEAEENGKLDMKEIHTYKKMFQRVQELWRRAEDYHKRXSKEPPLRSCRIVQMVAAEHRHSSGLPYWPYLTAETLKNRMGRQPPPPTQQHSITDNSLSLKTPPECLLRPLPPSVDDNIKECPLAPLPPSPLPPSVDDNLKECLLAPLPPSPLPPSVDDNLKTPP

SEQ ID NO: 1441 - protein, 725 aa, Homo sapiens
MATAATTTTTTTATVALTTSWDNATGRPTVEPDPILDNYVLLVVVMSLFVGGTLVVLSGVLLLCKRCWDVHQRLNRAMEEAEKTTTTYLDNGTHPAQDPDFRGEDPECQDAETERFLSTSSTGRRVSFNEAALFEQSRKTQDKGRQGGWQSTAAGASGMGGGRALMARCCRRYTLTEGDFHHLKNARLTHLHLPPLKIVTIHECDSGEASSATTPHPATSPKATLAIFQPPGKALTGRSVGPSSALPGDPYNSAAGATDFAEISPSASSDSGEGTSLDAGTRSTKAGGPGAAAGPGEAGPGSGAGTVLQFLTRLRRHASLDGASPYFKVKKWKLEPSQRAASLDTRGSPKRHHFQRQRAASESTEQEEGDAPQEDFIQYIARAGDAVAFPHPRPFLASPPPALGRLEAAEAAGGASPDSPPERGAGSAGPEQQQPPLEPDAERDAGPEQAQTSYRDLWSLRASLELHAAASDHSSSGNDRDSVRSGDSSGSGSGGAAPAFPPPSPPAPRPKDGEARRLLQMDSGYASIEGRGAGDDTEPPAAPARPRSPRAWPRRPRRDYSIDEKTDALFHEFLRHDPHFDDTPAAARHRARAHPHARKQWQRGRQHSDPGARAAPALAGTPAPPAGAARPARAPLRRGDSVDGPPDGRTLGGAGDDPAIPVIEEEPGGGGCPGSGLCVLPSGSVLDKLAAGLDERLFPPRLAEPVVATPALVAAAPTSPDHSPA

SEQ ID NO: 1442 - protein, 255 aa, Homo sapiens
DLCVGDVVCLRKDNIVPADMLLLASTEPSSLCYVETVDIDGETNLKFRQALMVTHKELATIKKMASFQGTVTCEAPNSRMHHFVGCLEWNDKKYSLDIGNLLLRGCRIRNTDTCYGLVIYAGFDTKIMKNCGKIHLKRTKLDLLMNKLVVVIFISVVLVCLVLAFGFGFSVKEFKDHHYYLSGVHGSSVAAESFFVFWSFLILLSVTIPMSMFILSEFIYLGNSVFIDWDVQMYYKPQDVPAKARSTSLNDHLGQ

SEQ ID NO: 1443 - protein, 309 aa, Homo sapiens
MKSWNNTIILEFLLLGISEEPELQAFLFGLFLSMYLVTVLGNLLIILATISDSHLHTPMYFFLSNLSFVDICFVSTTVPKMLVNIQTHNKVITYAGCITQMCFFLLFVGLDNFLLTVMAYDRFVAICHPLHYMVIMNPQLCGLLVLASWIMSVLNSMLQSLMVLPLPFCTHMEIPHFFCEINQVVHLACSDTFLNDIVMYFAVALLGGGPLTGILYSYSKIVSSIRAISSAQGKYKAFSTCASHLSVVSLFYGTCLGVYLSSAATHNSHTGAAASVMYTVVTPMLNPFIYSLRNKHIKGAMKTFFRGKQ

SEQ ID NO: 1444 - protein, 381 aa, Homo sapiens
AGQEVQTENVTVAEGGVAEITCRLHQYDGSIVVIQNPARQTLFFNGTRALKDERFQLEEFSPRRVRIRLSDARLEDEGGYFCQLYTEDTHHQIATLTVLVAPENPVVEVREQAVEGGEVELSCLVPRSRPAATLRWYRDRKELKGVSSSQENGKVWSVASTVRFRVDRKDDGGIIICEAQNQALPSGHSKQTQYVLDVQYSPTARIHASQAVVREGDTLVLTCAVTGNPRPNQIRWNRGNESLPERAEAVGETLTLPGLVSADNGTYTCEASNKHGHARALYVLVVYGESRLRPTEGGGGAPDPGAVVEAQTSVPYAIVGGILALLVFLIICVLVGMVWCSVRQKGSYLTHEASGLDEQGEAREAFLNGSDGHKRKEEFFI

SEQ ID NO: 1445 - protein, 200 aa, Homo sapiens
MNDMVLTVMAYDQFVAICHPLRYPVIMNPHLCVFLVLVSFILSLLNSQLHNQIVLQFTCFKNVEIFNFFCEPSQLLNLACSDSVINNIFMYLDSVIFGFLPISGILLSYYKIVSSILRIPSSDGKYKAFSTCGSHLAVVCLFYGTGLGAYLSSAASSFPRKGAVTSVMYTVVIPMLNPFIYSLRNRDIKSALWRLHSRTV

SEQ ID NO: 1446 - protein, 306 aa, Homo sapiens
MSGRQRTLFQTWGSSISRSSGTPGCSSGTERPQSPGSSKAPLPAAAEAQLESDDDVLLVAAYEAERQLCLENGGFCTSAGALWIYPTNCPVRDYQLHISRAALFCNTLVCLPTGLGKTFIAAVVMYNFYRWFPSGKVVFMAPTKPLVTQQIEACYQVMGIPQSHMAEMTGSTQASTRKEIWCSKRVLFLTPQVMVNDLSRGACPAAEIKCLVIDEAHKALGNYAYCQVVRELVKYTNHFRILALSATPGSDIKAVQQVITNLLIGQIELRSEDSPDILTYSHERKVEKLIVPLGEELAAIQKTYIQ

SEQ ID NO: 1447 - protein, 308 aa, Homo sapiens
NLTELSKFLLLGLSDDPELQPVLFGLFLSMYLVTVLGNLLIILAVSSDSHLHTPMYFFLSNLSFVDICFISTTVPKMLVSIQARSKDISYMGCLTQVYFLMMFAGMDTFLLAVMAYDRFVAICHPLHYTVIMNPCLCGLLVLASWFIIFWFSLVHILLMKRLTFSTGTEIPHFFCEPAQVLKVACSNTLLNNIVLYVATALLGVFPVAGILFSYSQIVSSLMGMSSTKGKYKAFSTCGSHLCVVSLFYGTGLGVYLSSAVTHSSQSSSTASVMYAMVTPMLNPFIYSLRNKDVKGALERLLSRADSCP

SEQ ID NO: 1448 - protein, 254 aa, Homo sapiens
MAAVAATAAAKGNGGGGGRAGAGDASGTRKKKGPGPLATAYLVIYNVVMTAGWLVIAVGLVRAYLAKGSYHSLYYSIEKPLKFFQTGALLEILHCAIGIVPSSVVLTSFQVMSRVFLIWAVTHSVKEVQSEDSVLLFVIAWTITEIIRYSFYTFSLLNHLPYLIKWARYTLFIVLYPMGVSGELLTIYAALPFVRQAGLYSISLPNKYNFSFDYYAFLILIMISYIPIFPQLYFHMIHQRRKILSHTEEHKKFE

SEQ ID NO: 1449 - protein, 410 aa, Homo sapiens
MSLMVVSMACVGFFLLEGPWPHVGGQDKPFLSAWPGTVVSEGQHVTLQCRSRLGFNEFSLSKEDGMPVPELYNRIFRNSFLMGPVTPAHAGTYRCCSSHPHSPTGWSAPSNPVVIMVTGVHRKPSLLAHPGPLVKSGETVILQCWSDVRFERFLLHREGITEDPLRLIGQLHDAGSQVNYSMGPMTPALAGTYRCFGSVTHLPYELSAPSDPLDIVVVGLYGKPSLSAQPGPTVQAGENVTLSCSSRSLFDIYHLSREAEAGELRLTAVLRVNGTFQANFPLGPVTHGGNYRCFGSFRALPHAWSDPSDPLPVSVTGNSRYLHALIGTSVVIIPFAILLFFLLHRWCANKKNAVVMDQEPAGNRTVNREDSDEQDPQEVTYAQLNHCVFTQRKITRPSQRPKTPPTDTSV

SEQ ID NO: 1450 - protein, 513 aa, Homo sapiens
LFQDLEKKKERLVVVDCESERLNAILGQVVKAARAQACSNFSLLPLSQGFMDIDLNKFKESGANVTGFQLVNYTDTIPAKIMQQWKNSDARDHTRVDWKRPKYTSALTYDGVKVMAEAFQSLRRQRIDISRRGNAGDCLANPAVPWGQGIDIQRALQQVRFEGLTGNVQFNEKGRRTNYTLHVIEMKHDGIRKIGYWNEDDKFVPAATDAQAGGDNSSVQNRTYIVTTILEDPYVMLKKNANQFEGNDRYEGYCVELAAEIAKHVGYSYRLEIVSDGKYGARDPDTKAWNGMVGELVYGRADVAVAPLTITLVREEVIDFSKPFMSLGISIMIKKPQKSKPGVFSFLDPLAYEIWMCIVFAYIGVSVVLFLVSRFSPYEWHSEEFEEGRDQTTSDQSNEFGIFNSLWFSLGAFMQQGCDISPRSLSGRIVGGVWWFFTLIIISSYTANLAAFLTVERMVSPIESAEDLAKQTEIAYGTLEAGSTKEFFRRSKIAVFEKMWTYMKSAEPSVFVR

SEQ ID NO: 1451 - protein, 375 aa, Homo sapiens
MQLQFRSWMLAALTLLVVFLIFADISEIEEEIGNSGGRGTIRSAVNSLHSKSNRAEVVINGSSSPAVVDRSNESIKHNIQPASSKWRHNQTLSLRIRKQILKFLDAEKDISVLKGTLKPGDIIHYIFDRDSTMNVSQNLYELLPRTSPLKNKHFGTCAIVGNSGVLLNSGCGQEIDAHSFVIRCNLAPVQEYARDVGLKTDLVTMNPSVIQRAFEDLVNATWREKLLQRLHSLNGSILWIPAFMARGGKERVEWVNELILKHHVNVRTAYPSLRLLHAVRGYWLTNKVHIKRPTTGLLMYTLATRFCKQIYLYGFWPFPLDQNQNPVKYHYYDSLKYGYTSQASPHTMPLEFKALKSLHEQGALKLTVGQCDGAT

SEQ ID NO: 1452 - protein, 685 aa, Homo sapiens
NQEPEDDPGALAMAVFIILSLFSVLVTGMGEGGAGSEKGGERECKLNQLPHCPSVSPSAQPWTHPGQSQLFADLSREELTAVMRFLTQQLGPGLVDAAQAQPSDNCVFSVELQLPPKAAALAHLDRGSPPPAREALAIVFFGRQPQPNVSELVVGPLPHPSYMRDVTVERHGGPLPYHRRPMLFQEYLDIDQMIFDRELPQASGLLHHCCFYKRRGRNLFGLYYNISGAGFFLHHVGLELLVNHKALDPARWTIQKVFYQGRYYDSLAQLEAQFEAGLVNVVLIPDNGTGGSWSLKSPVPPGPAPPLQFHPQGPRFSVQGSRVASSLWTFSFGLGAFSGPRIFDVPFQGERVAYEVSVQAALAIYGGNSPSALRSRYIDSGFGLGHFSTPLTHGVDCPYLATYVDWHFLFESQAAKTIRDAFCIFEQNQGLPLRRHHSDLYSHYFGGLAETVLVIRSVSTMLNYDYVWDMVFHPNGAIEIRLHTTGYISSAFPFGAAQRYGNKVSEHTLGTVHTHSAHFKVDLDVAGLENWVWAEDMAFVPMAVPWSPEHQMQRLQVTRKLLETEEQATFPMGGATPRYLYLASNHSNKWGHPRGYRIQVRSFSGEPLPQNSSVERGFSWGSAASGSGTVDELVGLIKNSCRYQLVVTQRKEEEPSSTSIYNLNDPWTPTVDFTDFINNETIAGQ

SEQ ID NO: 1453 - protein, 255 aa, Homo sapiens
QVRAPMVNPTLGVHEADLLKTSGTLISFIYPAQNPELLNKLSQRKTTVLAMDQVPRVTIAQGYDALSSMANIAGYKAVVLAANHFGRFFTGQITAAGKVPPAKILIVGGGVAGLASAGAAKSMGAIVRGFDTRAAALEQFKSLGAEPLEVDLKESGEGQGGYAKEMSKEFIEAEMKLFAQQCKEVDILISTALIPGKKAPVLFNKEMIESMKEGSVVVDLAAEAGGNFETTKPGELYIHKGITHIGYTDLPSRMA

SEQ ID NO: 1454 - protein, 584 aa, Homo sapiens
MTITYTSQVANARLGSFSRLLLCWRGSIYKLLYGEFLIFLLCYYIIRFIYRLALTEEQQLMFEKLTLYCDSYIQLIPISFVLGFYVTLVVTRWWNQYENLPWPDRLMSLVSGFVEGKDEQGRLLRRTLIRYANLGNVLILRSVSTAVYKRFPSAQHLVQAGFMTPAEHKQLEKLSLPHNMFWVPWVWFANLSMKAWLGGRIRDPILLQSLLNEMNTLRTQCGHLYAYDWISIPLVYTQVVTVAVYSFFLTCLVGRQFLNPAKAYPGHELDLVVPVFTFLQFFFYVGWLKVAEQLINPFGEDDDDFETNWIVDRNLQVSLLAVDEMHQDLPRMEPDMYWNKPEPQPPYTAASAQFRRASFMGSTFNISLNKEEMEFQPNQEDEEDAHAGIIGRFLGLQSHDHHPPRANSRTKLLWPKRESLLHEGLPKNHKAAKQNVRGQEDNKAWKLKAVDAFKSAPLYQRPGYYSAPQTPLSPTPMFFPLEPSAPSKLHSVTGIDTKDKSLKTVSSGAKKSFELLSESDGALMEHPEVSQVRRKTVEFNLTDMPEIPENHLKEPLEQSPTNIHTTLKDHMDPYWALENRSVLH

SEQ ID NO: 1455 - protein, 579 aa, Homo sapiens
MPSASCDTLLDDIEDIVSQEDSKPQDRHFVRKDVVPKVRRRNTQKYLQEEENSPPSDSTIPGIQKIWIRTWGCSHNNSDGEYMAGQLAAYGYKITENASDADLWLLNSCTVKNPAEDHFRNSIKKAQEENKKIVLAGCVPQAQPRQDYLKGLSIIGVQQIDRVVEVVEETIKGHSVRLLGQKKDNGRRLGGARLDLPKIRKNPLIEIISINTGCLNACTYCKTKHARGNLASYPIDELVDRAKQSFQEGVCEIWLTSEDTGAYGRDIGTNLPTLLWKLVEVIPEGAMLRLGMTNPPYILEHLEEMAKILNHPRVYAFLHIPVQSASDSVLMEMKREYCVADFKRVVDFLKEKVPGITIATDIICGFPGETDQDFQETVKLVEEYKFPSLFINQFYPRPGTPAAKMEQVPAQVKKQRTKDLSRVFHSYSPYDHKIGERQQVLVTEESFDSKFYVAHNQFYEQVLVPKNPAFMGKMVEVDIYESGKHFMKGQPVSDAKVYTPSISKPLAKGEVSGLTKDFRNGLGNQLSSGSHTSAASQCDSASSRMVLPMPRLHQDCALRMSVGLALLGLLFAFFVKVYN

SEQ ID NO: 1456 - protein, 71 aa, Homo sapiens
MVYPLGPLCPLLSRSHWGSWVSSLSDFEAPRLCVLSYLSLFEQIFFFFYLNWVWKLLQKLDWVQDQIRSDN

SEQ ID NO: 1457 - protein, 288 aa, Homo sapiens [sequence omitted]

SEQ ID NO: 1458 - protein, 420 aa, Homo sapiens
RRRRRPASPPAGLALAPRSPSASPEPREGETLSPSMQREEGFNTKMADGPDEYDTEAGCVPLLHPEEIKPQSHYNHGYGEPLGRKTHIDDYSTWDIVKATQYGIYERCRELVEAGYDVRQPDKENVTLLHWAAINNRIDLVKYYISKGAIVDQLGGDLNSTPLHWATRQGHLSMVVQLMKYGADPSLIDGEGCSCIHLAAQFGHTSIVAYLIAKGQDVDMMDQNGMTPLMWAAYRTHSVDPTRLLLTFNVSVNLGDKYHKNTALHWAVLAGNTTVISLLLEAGANVDAQNIKGESALDLAKQRKNVWMINHLQEARQAKGYDNPSFLRKLKADKEFRQKVMLGTPFLVIWLVGFIADLNIDSWLIKGLMYGGVWATVQFLSKSFFDHSMHSALPLGIYLATKFWMYVTWFFWFWNDILWL

SEQ ID NO: 1459 - protein, 431 aa, Homo sapiens
MLLLLLLLPLLWGTKGMEGDRQYGDGYLLQVQELVTVQEGLCVHVPCSFSYPQDGWTDSDPVHGYWFRAGDRPYQDAPVATNNPDREVQAETQGRFQLLGDIWSNDCSLSIRDARKRDKGSYFFRLERGSMKWSYKSQLNYKTKQLSVFVTALTHRPDILILGTLESGHSRNLTCSVPWACKQGTPPMISWIGASVSSPGPTTARSSVLTLTPKPQDHGTSLTCQVTLPGTGVTTTSTVRLDVSYPPWNLTMTVFQGDATASTALGNGSSLSVLEGQSLRLVCAVNSNPPARLSWTRGSLTLCPSRSSNPGLLELPRVHVRDEGEFTCRAQNAQGSQHISLSLSLQNEGTGTSRPVSQVTLAAVGGAGATALAFLSFCIIFIIVRSCRKKSARPAAGVGDTGMEDAKAIRGSASQVSDVGFSTPSIQPGHL

SEQ ID NO: 1460 - protein, 741 aa, Homo sapiens
MALFTPWKLSSQKLGFFLVTFGFIWGMMLLHFTIQQRTQPESSSMLREQILDLSKRYIKALAEENRNVVDGPYAGVMTAYDLKKTLAVLLDNILQRIGKLESKVDNLVVNGTGTNSTNSTTAVPSLVALEKINVADIINGAQEKCVLPPMDGYPHCEGKIKWMKDMWRSDPCYADYGVDGSTCSFFIYLSEVENWCPHLPWRAKNPYEEADHNSLAEIRTDFNILYSMMKKHEEFRWMRLRIRRMADAWIQAIKSLAEKQNLEKRKRKKVLVHLGLLTKESGFKIAETAFSGGPLGELVQWSDLITSLYLLGHDIRISASLAELKEIMKKVVGNRSGCPTVGDRIVELIYIDIVGLAQFKKTLGPSWVHYQCMLRVLDSFGTEPEFNHANYAQSKGHKTPWGKWNLNPQQFYTMFPHTPDNSFLGFVVEQHLNSSDIHHINEIKRQNQSLVYGKVDSFWKNKKIYLDIIHTYMEVHATVYGSSTKNIPSYVKNHGILSGRDLQFLLRETKLFVGLGFPYEGPAPLEAIANGCAFLNPKFNPPKSSKNTDFFIGKPTLRELTSQHPYAEVFIGRPHVWTVDLNNQEEVEDAVKAILNQKIEPYMPYEFTCEGMLQRINAFIEKQDFCHGQVMWPPLSALQVKLAEPGQSCKQVCQESQLICEPSFFQHLNKDKDMLKYKVTCQSSELAKDILVPSFDPKNKHCVFQGDLLLFSCAGAHPRHQRVCPCRDFIKGQVALCKDCL

SEQ ID NO: 1461 - protein, 430 aa, Homo sapiens
MSSKYPRSVRRCLPLCALTLEAALILLFYFFTHYDASLEDQKGLVASYQGASLPLTCHSSLCSGSETGKAVGQDLTVMAALGLGFLTSNFRRHSWSSVAFNLFMLALGVQWAILLDGFLSQFPPGKVVITLFSIRLATMSAMSVLISAGAVLGKVNLAQLVVMVLVEVTALGTLRMVISNIFNTDYHMNLRHFYVFAAYFGLTVAWCLPKPLPKGTEDNDQRATIPSLSAMLGALFLWMFWPSVNSALLRSPIQRKNAMFNTYYALAVSVVTAISGSSLAHPQRKISMTYVHSAVLAGGVAVGTSCHLIPSPWLAMVLGLVAGLISIGGAKCLPVCCNRVLGIHHISVMHSIFSLLGLLGEITYIVLLVLHTVWNGNGMIGFQVLLSIGELSLAIVIALTSGLLTGLLLNLKIWKAPHVAKYFDDQVFWK

SEQ ID NO: 1462 - protein, 417 aa, Homo sapiens
MSSKYPRSVRRCLPLWALTLEAALILLFYFFTHYDASLEDQKGLVASYQVGQDLTVMAAIGLGFLTSSFRRHSWSSVAFNLFMLALGVQWAILLDGFLSQFPSGKVVITLFSIRLATMSALSVLISVDAVLGKVNLAQLVVMVLVEVTALGNLRMVISNIFNTDYHMNLRHFYVFAAYFGLTVAWCLPKPLPKGTEDNDQRATIPSLSAMLGALFLWMFWPSVNSPLLRSPIQRKNAMFNTYYALAVSVVTAISGSSLAHPQRKISMTYVHSAVLAGGVAVGTSCHLIPSPWLAMVLGLVAGLISIGGAKCLPVCCNRVLGIHHISVMHSIFSLLGLLGEITYIVLLVLHTVWNGNGMIGFQVLLSIGELSLAIVIALTSGLLTGLLLNLKIWKAPHVAKYFDDQVFWKFPHLAVGF

SEQ ID NO: 1463 - protein, 376 aa, Homo sapiens
DIPPLAGKIAALSLSALPVSYALNHVSALSHPLWVALMSALILGLLFVAVYSLSHGEVSYDPLYAVFAVFAFTSVVDLIIALQEDSYVVGFMEFYTKEGEPYLRTAHGVFICYWDGTVHYLLYLAMAGAICRRKRYRNFGLYWLGSFAMSILVFLTGNILGKYSSEIRPAFFLTIPYLLVPCWAGMKVFSQPRALTRCTANMVQEEQRKGLLQRPADLALVIYLILAGFFTLFRGLVVLDCPTDACFVYIYQYEPYLRDPVAYPKVQMLMYMFYVLPFCGLAAYALTFPGCSWLPDWALVFAGGIGQAQFSHMGASMHLRTPFTYRVPEDTWGCFFVCNLLYALGPHLLAYRCLQWPAFFHQPPPSDPLALHKKQH

SEQ ID NO: 1464 - protein, 241 aa, Homo sapiens
MTLQWAAVATFLYAEIGLILIFCLPFIPPQRWQKIFSFNVWGKIATFWNKAFLTIIILLIVLFLDAVREVRKYSSVHTIEKSSTSRPDAYEHTQMKLFRSQRNLYISGFSLFFWLVLRRLVTLITQLAKELSNKGVLKTQAENTNKAAKKFMEENEKLKRILKSHGKDEECVLEAENKKLVEDQEKLKTELRKTSDALSKAQNDVMEMKMQSERLSKEYDQLLKEHSELQDRLERGNKKRL

SEQ ID NO: 1465 - protein, 152 aa, Homo sapiens [sequence omitted]

SEQ ID NO: 1466 - protein, 725 aa, Homo sapiens
MEPGDAARPGSGRATGAPPPRLLLLPLLLGWGLRVAAAASASSSGAAAEDSSAMEELATEKEAEESHRQDSVSLLTFILLLTLTILTIWLFKHRRVRFLHETGLAMIYGLIVGVILRYGTPATSGRDKSLSCTQEDRAFSTLLVNVSGKFFEYTLKGEISPGKINSVEQNDMLRKVTFDPEVFFNILLPPIIFHAGYSLKKRHFFRNLGSILAYAFLGTAVSCFIIGNLMYGVVKLMKIMGQLSDKFYYTDCLFFGAIISATDPVTVLAIFNELHADVDLYALLFGESVLNDAVAIVLSSSIVAYQPAGLNTHAFDAAAFFKSVGIFLGIFSGSFTMGAVTGVNANVTKFTKLHCFPLLETALFFLMSWSTFLLAEACGFTGVVAVLFCGITQAHYTYNNLSVESRSRTKQLFEVLHFLAENFIFSYMGLALFTFQKHVFSPIFIIGAFVAIFLGRAAHIYPLSFFLNLGRRHKIGWNFQHMMMFSGLRGAMAFALAIRDTASYARQMMFTTTLLIVFFTVWIIGGGTTPMLSWLNIRVGVEEPSEEDQNEHHWQYFRVGVDPDQDPPPNNDSFQVLQGDGPDSARGNRTKQESAWIFRLWYSFDHNYLKPILTHSGPPLTTTLPAWCGLLARCLTSPQVYDNQEPLREEDSDFILTEGDLTLTYGDSTVTANGSSSSHTASTSLEGSRRTKSSSEEVLERDLGMGDQKVSSRGTRLVFPLEDNA

SEQ ID NO: 1467 - protein, 143 aa, Homo sapiens
MDGSGEQPRGGGPTSSEQIMKTGALLLQGMIAAVDTDSPREVFFRVAADMFSDGNFNWGRVVALFYFASKLVLKALCTKVPELIRTIMGWTLDFLRERLLGWIQDQGGWDGLLSYFGTPTWQTVTIFVAGVLTASLTIWKKMG

SEQ ID NO: 1468 - protein, 432 aa, Homo sapiens
MGAPAASLLLLLLLFACCWAPGGANLSQDGYWQEQDLELGTLAPLDEAISSTVWSSPDMLASQDSQPWTSDETVVAGGTVVLKCQVKDHEDSSLQWSNPAQQTLYFGEKRALRDNRIQLVTSTPHELSISISNVALADEGEYTCSIFTMPVRTAKSLVTVLGIPQKPIITGYKSSLREKDTATLNCQSSGSKPAARLTWRKGDQELHGEPTRIQEDPNGKTFTVSSSVTFQVTREDDGASIVCSVNHESLKGADRSTSQRIEVLYTPTAMIRPDPPHPREGQKLLLHCEGRGNPVPQQYLWEKEGSVPPLKMTQESALIFPFLNKSDSGTYGCTATSNMGSYKAYYTLNVNDPSPVPSSSSTYHAIIGGIVAFIVFLLLIMLIFLGHYLIRHKGTYLTHEAKGSDDAPDADTAIINAEGGQSGGDDKKEYFI

SEQ ID NO: 1469 - protein, 484 aa, Homo sapiens
MACRGGAGNGHRASATLSRVSPGSLYTCRTRTHNICMVSDFFYPNMGGVESHIYQLSQCLIERGHKVIIVTHAYGNRKGIRYLTSGLKVYYLPLKVMYNQSTATTLFHSLPLLRYIFVRERVTIIHSHSSFSAMAHDALFHAKTMGLQTVFTDHSLFGFADVSSVLTNKLLTVSLCDTNHIICVSYTSKENTVLRAALNPEIVSVIPNAVDPTDFTPDPFRRHDSITIVVVSRLVYRKGIDLLSGIIPELCQKYPDLNFIIGGEGPKRIILEEVRERYQLHDRVRLLGALEHKDVRNVLVQGHIFLNTSLTEAFCMAIVEAASCGLQVVSTRVGGIPEVLPENLIILCEPSVKSLCEGLEKAIFQLKSGTLPAPENIHNIVKTFYTWRNVAERTEKVYDRVSVEAVLPMDKRLDRLISHCGPVTGYIFALLAVFNFLFLIFLRWMTPDSIIDVAIDATGPRGAWTNNYSHSKRGGENNEISETR

SEQ ID NO: 1470 - protein, 307 aa, Homo sapiens
MGGFQRGKYGTMAEGRSEDNLSATPPALRIILVGKTGCGKSATGNSILGQPVFESKLRAQSVTRTCQVKTGTWNGRKVLVVDTPSIFESQADTQELYKNIGDCYLLSAPGPHVLLLVIQLGRFTAQDTVAIRKVKEVFGTGAMRHVVILFTHKEDLGGQALDDYVANTDNCSLKDLVRECERRYCAFNNWGSVEEQRQQQAELLAVIERLGREREGSFHSNDLFLDAQLLQRTGAGACQEDYRQYQAKVEWQVEKHKQELRENESNWAYKALLRVKHLMLLHYEIFVFLLLCSILFFIIFLFIFHYI

SEQ ID NO: 1471 - protein, 255 aa, Homo sapiens
MPAELLLLLIVAFASPSCQVLSSLRMAAILDDQTVCGRGERLALALAREQINGIIEVPAKARVEVDIFELQRDSQYETTDTMCQILPKGVVSVLGPSSSPASASTVSHICGEKEIPHIKVGPEETPRLQYLRFASVSLYPSNEDVSLAVSRILKSFNYPSASLICAKAECLLRLEELVRGFLISKETLSVRMLDDSRDPTPLLKEIRDDKVSTIIIDANASISHLILRKASELGMTSAFYKYILTTMDFPILHLD

SEQ ID NO: 1472 - protein, 514 aa, Homo sapiens
LGLLRLDPSGGALLLCGLVALLGWSWLRRRRARGIPPGPTPWPLVGNFGHVLLPPFLRRRSWLSSRTRAAGIDPSVIGPQVLLAHLARVYGSIFSFFIGHYLVVVLSDFHSVREALVQQAEVFSDRPRVPLISIVTKEKGVVFAHYGPVWRQQRKFSHSTLRHFGLGKLSLEPKIIEEFKYVKAEMQKHGEDPFCPFSIISNAVSNIICSLCFGQRFDYTNSEFKKMLGFMSRGLEICLNSQVLLVNICPWLYYLPFGPFKELRQIEKDITSFLKKIIKDHQESLDRENPQDFIDMYLLHMEEERKNNSNSSFDEEYLFYIIGDLFIAGTDTTTNSLLWCLLYMSLNPDVQEKVHEEIERVIGANRAPSLTDKAQMPYTEATIMEVQRLTVVVPLAIPHMTSENTVQGYTIPKGTLILPNLWSVHRDPAIWEKPEDFYPNRFLDDQGQLIKKETFIPFGIGKRVCMGEQLAKMELFLMFVSLMQSFAFALPEDSKKPLLTGRFGLTLAPHPFNI

SEQ ID NO: 1473 - protein, 290 aa, Homo sapiens
PGPRKPVSLWHKLPPPATYTPPQHTSHGTTAPAVLLRAKHKGSTEEASVGNPEGAFMKMLQARKQHMSTELTIESEAPSDSSGINLSGFGSEQLDTNDESDVSSALSYILPYLSLRNLGDQLEIQLTEQLRSLIPNEDVRKFMSHVIWTLKMECSETHVQGSCAKLMSRTGLLMKLLSEQQEAKALNVEWDTDQQKTNYINENMEQNEQKEQKSSELMKEVPGYDYKNKLIFAISVTVILIILIIIFCFIEAENEPLLKQHGNRPGKPIHSDLYRVAAAAERKWEEKLEV

SEQ ID NO: 1474 - protein, 252 aa, Homo sapiens
MRAPLLPPAPVVLSLLILGSGHYAAGLDLNDTYSGKREPFSGDHSADGFEVTSRSEMSSGSEISPVSEMPSSSEPSSGADYDYSEEYDNEPQIPGYIVDDSVRVEQVVKPPQNKTESENTSDKPKRKKKGGKNGKNRRNRKKKNPCNAEFQNFCIHGECKYIEHLEAVTCKCQQEYFGERCGEKSMKTHSMIDSSLSKIALAAIAAFMSAVILTAVAVITVQLRRQYVRKYEGEAEERKKLRQENGNVHAIA

SEQ ID NO: 1475 - protein, 345 aa, Homo sapiens
MSNNGADLTFGYISCFVAILLFGSNFVPLKKFDTGDGMFLQWVLCAAIWLVALVVNLILHCPKFWPFAMLGGCIWATGNIAVVPIIKTIGLGLGILIWGSFNALTGWASSRFGWFGLDAEEVSNPLLNYIGAGLSVVSAFIFLFIKSEIPNNTCSMDTTPLITEHVINTTQDPCSWVDKLSTVHHRIVGCSLAVISGVLYGSTFVPIIYIKDHSKRNDSIYAGASQYDLDYVFAHFSGIFLTSTVYFLAYCIAMKNSPKLYPEAVLPGFLSGVLWAIATCCWFIANHSLSAVVSFPIITAGPGFIAAMWGIFMFKEIKGLQNYLLMILAFCIILTGALCTAFSKI

SEQ ID NO: 1476 - protein, 827 aa, Homo sapiens
MRGCLRLALLCALPWLLLAASPGHPAKSPRQPPAPRRDPFDAARGADFDHVYSGVVNLSTENIYSFNYTSQPDQVTAVRVYVNSSSENLNYPVLVVVRQQKEVLSWQVPLLFQGLYQRSYNYQEVSRTLCPSEATNETGPLQQLIFVDVASMAPLGAQYKLLVTKLKHFQLRTNVAFHFTASPSQPQYFLYKFPKDVDSVIIKVVSEMAYPCSVVSVQNIMCPVYDLDHNVEFNGVYQSMTKKAAITLQKKDFPGEQFFVVFVIKPEDYACGGSFFIQEKENQTWNLQRKKNLEVTIVPSIKESVYVKSSLFSVFIFLSFYLGCLLVGFVHYLRFQRKSIDGSFGSNDGSGNMVASHPIAASTPEGSNYGTIDESSSSPGRQMSSSDGGPPGQSDTDSSVEESDFDTMPDIESDKNIIRTKMFLYLSDLSRKDRRIVSKKYKIYFWNIITIAVFYALPVIQLVITYQTVVNVTGNQDICYYNFLCAHPLGVLSAFNNILSNLGHVLLGFLFLLIVLRRDILHRRALEAKDIFAVEYGIPKHFGLFYAMGIALMMEGVLSACYHVCPNYSNFQFDTSFMYMIAGLCMLKLYQTRHPDINASAYSAYASFAVVIMVTVLGVVFGKNDVWFWVIFSAIHVLASLALSTQIYYMGRFKIDLGIFRRAAMVFYTDCIQQCSRPLYMDRMVLLVVGNLVNWSFALFGLIYRPRDFASYMLGIFICNLLLYLAFYIIMKLRSSEKVLPVPLFCIVATAVMWAAALYFFFQNLSSWEGTPAESREKNRECILLDFFDDHDIWHFLSATALFFSFLVLLTLDDDLDVVRRDQIPVF

SEQ ID NO: 1477 - protein, 860 aa, Homo sapiens [sequence omitted]

SEQ ID NO: 1478 - protein, 631 aa, Homo sapiens [sequence omitted]

SEQ ID NO: 1479 - protein, 138 aa, Homo sapiens [sequence omitted]

SEQ ID NO: 1480 - protein, 620 aa, Homo sapiens
TCPPLLALVITFSGRVRLRTPKCSIPKESLGNQAPSILSQAPQPSPREPVRNDPTMAKLWFKFQRYFRRKPVRFFTFLALYLTAGSLVFLHSGFVGQPAVSGNQANPAAAGGPAEGAELSFLGDMHLGRGFRDTGEASSIARRYGPWFKGKDGNERAKLGDYGGAWSRALKGRVVREKEEERAKYIGCYLDDTQSRALRGVSFFDYKKMTIFRCQDNCAERGYLYGGLEFGAECYCGHKIQATNVSEAECDMECKGERGSVCGGANRLSVYRLQLAQESARRYGSAVFRGCFRRPDNLSLALPVTAAMLNMSVDKCVDFCTEKEYPLAALAGTACHCGFPTTRFPLHDREDEQLCAQKCSAEEFESCGTPSYFIVYQTQVQDNRCMDRRFLPGKSKQLIALASFPGAGNTWARHLIELATGFYTGSYYFDGSLYNKGFKGERDHWRSGRTICIKTHESGQKEIEAFDAAILLIRNPYKALMAEFNRKYGGHIGFAAHAHWKGKEWPEFVRNYAPWWATHTLDWLKFGKKVLVVHFEDLKQDLFVQLGRMVSLLGVAVREDRLLCVESQKDGNFKRSGLRKLEYDPYTADMQKTISAYIKMVDAALKGRNLTGVPDDYYPR

SEQ ID NO: 1481 - protein, 255 aa, Homo sapiens
EQPNQVNYGNICTGLEVLSFLLTVLQSPAILSSFKPLQRGIAACMTCGNTKVLRAVHSLLSRLMSIFPTEPKYIVLNNVLLSLCFSWLLLFCETLGNFYILGTLMILKSACSNNPSYIDRLISVFMRSLQKMVREHLNPQAASGSTEATSGTSELVMLSLELVKTRLAVMSMEMRKNFIQAILTSLIEKSPDAKILRAVVKIVEEWVKNNSPMAANQTPTLREKSILLVKMMTYIEKRFPEDLELNAQFLDLVNY

SEQ ID NO: 1482 - protein, 245 aa, Homo sapiens
MISVVHERVPPKEVQPPLPDTFFDHFNRVQWAFSICEINGMILVGLWLIQWLLLKYKSIISRRFFCIVGTLYLYRCITMYVTTLPVPGMHFNCSPKLFGDWEAQLRRIMKLIAGGGLSITGSHNMCGDYLYSGHTVMLTLTYLFIKEYSPRRLWWYHWICWLLSVVGIFCILLAHDHYTVDVVVAYYITTRLFWWYHTMANQQVLKEASQMNLLARVWWYRPFQYFEKNVQGIVPRSYHWPFPWP

SEQ ID NO: 1483 - protein, 555 aa, Homo sapiens
LESTPFSGVANQIHTLCERPTYGEVKDGALDVKRQHKCPGPTSGPSPGTNLSGCIRMNDDPSMEENGVERVCPESLLQSREYSSLPLPRHTSSTDGTITSSDPGLEILNMASCDLDRNSLCKKEEDTRSASPTIEAQGTSPAHDNIAFQDSTSKDKTILNLEAKEEPETIEEHKKEHASGDSVVSPLPVTTVKSVNLRQSENTSANEKEVEAEFLRLSLGFKCDWFTLEKRVKLEERSRDLAEENLKKEITNCLKLLESLTPLCEDDNQAQEIIKKLEKSIKFLSQCAARVASRAEMLGAINQESRVSKAVEVMIQHVENLKRMYAKEHAELEELKQVLLQNERSFNPLEDDDDCQIKKRSASLNSKPSSLRRVTIASLPRNIGNAGMVAGMENNDRFSRRSSSWRILGSKQSEHRPSLPRFISTYSWADAEEEKCELKTKDDSEPSGEETVERTRKPSLSEKKNNPSKWDVSSVYDTIASWATNLKSSIRKANKALWLSIAFIVLFAALMSFLTGQLFQKSVDAAPTQQEDSWTSLEHILWPFTRLRHNGPPPV

SEQ ID NO: 1484 - protein, 72 aa, Homo sapiens
MLNNHCYFNVLFIYLFVIFVETGFHHVVQAGLKLLGSSNLPTSASQNAGITGVSHCVRQTIAILKLDYFLNS

SEQ ID NO: 1485 - protein, 616 aa, Homo sapiens
MKHLWFFLLLVAAPRWVLSQVQLQESGPGLVKPSETLSLTCTVSGGSISSYYWSWIRQPAGKGLEWIGRIYTSGSTNYNPSLKSRVTMSVDTSKNQFSLKLSSVTAADTAVYYCARDTVRGGTVSLCDAFDIWGQGTMVTVSSGSASAPTLFPLVSCENSPSDTSSVAVGCLAQDFLPDSITFSWKYKNNSDISSTRGFPSVLRGGKYAATSQVLLPSKDVMQGTDEHVVCKVQHPNGNKEKNVPLPVIAELPPKVSVFVPPRDGFFGNPRKSKLICQATGFSPRQIQVSWLREGKQVGSGVTTDQVQAEAKESGPTTYKVTSTLTIKESDWLSQSMFTCRVDHRGLTFQQNASSMCGPDQDTAIRVFAIPPSFASIFLTKSTKLTCLVTDLTTYDSVTISWTRQNGEAVKTHTNISESHPNATFSAVGEASICEDDWNSGERFTCTVTHTDLPSPLKQTISRPKGVALHRPDVYLLPPAREQLNLRESATITCLVTGFSPADVFVQWMQRGQPLSPEKYVTSAPMPEPQAPGRYFAHSILTVSEEEWNTGETYTCVVAHEALPNRVTERTVDKSTEGEVSADEEGFENLWATASTFIVLFLLSLFYSTTVTLFKV

SEQ ID NO: 1486 - protein, 268 aa, Homo sapiens
TWILTCIYLQLLLFNPLVKTEGICRNRVTNNVKDVTKLVANLPKDYMITLKYVPGMDVLPSHCWISEMVVQLSDSLTDLLDKFSNISEGLSNYSIIDKLVNIVDDLVECVKENSSKDLKKSFKSPEPRLFTPEEFFRIFNRSIDAFKDFVVASETSDCVVSSTLSPEKDSRVSVTKPFMLPPVAASSLRNDSSSSNRKAKNPPGDSSLHWAAMALPALFSLIIGFAFGALYWKKRQPSLTRAVENIQINEEDNEISMLQEKEREFQEV

SEQ ID NO: 1487 - protein, 519 aa, Homo sapiens
MIPVSLVVVVVGGWTVVYLTDLVLKSSVYFKHSYEDWLENNGLSISPFHIRWQTAVFNRAFYSWGRRKARMLYQWFNFGMVFGVIAMFSSFFLLGKTLMQTLAQMMADSPSSYSSSSSSSSSSSSSSSSSSSSSSSLHNEQVLQVVVPGINLPVNQLTYFFTAVLISGVVHEIGHGIAAIREQVRFNGFGIFLFIIYPGAFVDLFTTHLQLISPVQQLRIFCAGIWHNFVLALLGILALVLLPVILLPFYYTGVGVLITEVAEDSPAIGPRGLFVGDLVTHLQDCPVTNVQDWNECLDTIAYEPQIGYCISASTLQQLSFPVRAYKRLDGSTECCNNHSLTDVCFSYRNNFNKRLHTCLPARKAVEATQVCRTNKDCKKSSSSSFCIIPSLETHTRLIKVKHPPQIDMLYVGHPLHLHYTVSITSFIPRFNFLSIDLPVVVETFVKYLISLSGALAIVNAVPCFALDGQWILNSFLDATLTSVIGDNDVKDLIGFFILLGGSVLLAANVTLGLWMVTAR

SEQ ID NO: 1488 - protein, 307 aa, Homo sapiens
MDDFISISLLSLAMLVGCYVAGIIPLAVNFSEERLKLVTVLGAGLLCGTALAVIVPEGVHALYEDILEGKHHQASETHNVIASDKAAEKSVVHEHEHSHDHTQLHAYIGVSLVLGFVFMLLVDQIGNSHVHSTDDPEAARSSNSKITTTLGLVVHAAADGVALGAAASTSQTSVQLIVFVAIMLHKAPAAFGLVSFLMHAGLERNRIRKHLLVFALAAPVMSMVTYLGLSKSSKEALSEVNATGVAMLFSAGTFLYVATVHVLPEVGGIGHSHKPDATGGRGLSRLEVAALVLGCLIPLILSVGHQH

SEQ ID NO: 1489 - protein, 132 aa, Homo sapiens
MTAAASLLASLLPALPPLNLQDAKFVEERRKQLQNYLRSVMNKVIQMVPEFAASPKKETLIQLMPFFVMGLQVGMYGLFHFGVMMDQPQPSLTRADESPCDRVLSPCAAHRKQRDCCLSWKAEPERFLVKKK

SEQ ID NO: 1490 - protein, 759 aa, Homo sapiens
MRLLRRWAFAALLLSLLPTPGLGTQGPAGALRWGGLPQLGGPGAPEVTEPSRLVRESSGGEVRKQQLDTRVRQEPPGGPPVHLAQVSFVIPAFNSNFTLDLELNHHLLSSQYVERHFSREGTTQHSTGAGDHCYYQGKLRGNPHSFAALSTCQGLHGVFSDGNLTYIVEPQEVAGPWGAPQGPLPHLIYRTPLLPDPLGCREPGCLFAVPAQSAPPNRPRLRRKRQVRRGHPTVHSETKYVELIVINDHQLFEQMRQSVVLTSNFAKSVVNLADVIYKEQLNTRIVLVAMETWADGDKIQVQDDLLETLARLMVYRREGLPEPSDATHLFSGRTFQSTSSGAAYVGGICSLSHGGGVNEYGNMGAMAVTLAQTLGQNLGMMWNKHRSSAGDCKCPDIWLGCIMEDTGFYLPRKFSRCSIDEYNQFLQEGGGSCLFNKPLKLLDPPECGNGFVEAGEECDCGSVQECSRAGGNCCKKCTLTHDAMCSDGLCCRRCKYEPRGVSCREAVNECDIAETCTGDSSQCPPNLHKLDGYYCDHEQGRCYGGRCKTRDRQCQVLWGHAAADRFCYEKLNVEGTERGSCGRKGSGWVQCSKQDVLCGFLLCVNISGAPRLGDLVGDISSVTFYHQGKELDCRGGHVQLADGSDLSYVEDGTACGPNMLCLDHRCLPASAFNFSTCPGSGERRICSHHGVCSNEGKCICQPDWTGKDCSIHNPLPTSPPTGETERYKGPSGTNIIIGSIAGAVLVAAIVLGGTGWGFK

SEQ ID NO: 1491 - protein, 505 aa, Homo sapiens
MAESAGASSFFPLVVLLLAGSGGSGPRGVQALLCACTSCLQANYTCETDGACMVSIFNLDGMEHHVRTCIPKVELVPAGKPFYCLSSEDLRNTHCCYTDYCNRIDLRVPSGHLKEPEHPSMWGPVELVGIIAGPVFLLFLIIIIVFLVINYHQRVYHNRQRLDMEDPSCEMCLSKDKTLQDLVYDLSTSGSGSGLPLFVQRTVARTIVLQEIIGKGRFGEVWRGRWRGGDVAVKIFSSREERSWFREAEIYQTVMLRHENILGFIAADNKDNGTWTQLWLVSDYHEHGSLFDYLNRYTVTIEGMIKLALSAASGLAHLHMEIVGTQGKPGIAHRDLKSKNILVKKNGMCAIADLGLAVRHDAVTDTIDIAPNQRVGTKRYMAPEVLDETINMKHFDSFKCADIYALGLVYWEIARRCNSGGVHEEYQLPYYDLVPSDPSIEEMRKVVCDQKLRPNIPNWWQSYEALRVMGKMMRECWYANGAARLTALRIKKTLSQLSVQEDVKI

SEQ ID NO: 1492 - protein, 455 aa, Homo sapiens
MVFLSGNASDSSNCTQPPAPVNISKAILLGVILGGLILFGVLGNILVILSVACHRHLHSVTHYYIVNLAVADLLLTSTVLPFSAIFEVLGYWAFGRVFCNIWAAVDVLCCTASIMGLCIISIDRYIGVSYPLRYPTIVTQRRGLMALLCVWALSLVISIGPLFGWRQPAPEDETICQINEEPGYVLFSALGSFYLPLAIILVMYCRVYVVAKRESRGLKSGLKTDKSDSEQVTLRIHRKNAPAGGSGMASAKTKTHFSVRLLKFSREKKAAKTLGIVVGCFVLCWLPFFLVMPIGSFFPDFKPSETVFKIVFWLGYLNSCINPIIYPCSSQEFKKAFQNVLRIQCLCRKQSSKHALGYTLHPPSQAVEGQHKDMVRIPVGSRETFYRISKTDGVCEWKFFSSMPRGSARITVSKDQSSCTTARRGMDCRYFTKNCREHIKHVNFMMPPWRKGSEC

SEQ ID NO: 1493 - protein, 572 aa, Homo sapiens
MTFRDLLSVSFEGPRPDSSAGGSSAGGGGGSAGGAAPSEGPAVGGVPGGAGGGGGVVGAGSGEDNRSSAGEPGSAGAGGDVNGTAAVGGLVVSAQGVGVGVFLAAFILMAVAGNLLVILSVACNRHLQTVTNYFIVNLAVADLLLSATVLPFSATMEVLGFWAFGRAFCDVWAAVDVLCCTASILSLCTISVDRYVGVRHSLKYPAIMTERKAAAILALLWVVALVVSVGPLLGWKEPVPPDERFCGITEEAGYAVFSSVCSFYLPMAVIVVMYCRVYVVARSTTRSLEAGVKRERGKASEVVLRIHCRGAATGADGAHGMRSAKGHTFRSSLSVRLLKFSREKKAAKTLAIVVGVFVLCWFPFFFVLPLGSLFPQLKPSEGVFKVIFWLGYFNSCVNPLIYPCSSREFKRAFLRLLRCQCRRRRRRRPLWRVYGHHWRASTSGLRQDCAPSSGDAPPGAPLALTALPDPDPEPPGTPEMQAPVASRRKPPSAFREWRLLGPFRRPTTQLRAKVSSLSHKIRAGGAQRAEAACAQRSEVEAVSLGVPHEVAEGATCQAYELADYSNLRETDI

SEQ ID NO: 1494 - protein, 408 aa, Homo sapiens
MAPWPHENSSLAPWPDLPTLAPNTANTSGLPGVPWEAALAGALLALAVLATVGGNLLVIVAIAWTPRLQTMTNVFVTSLAAADLVMGLLVVPPAATLALTGHWPLGATGCELWTSVDVLCVTASIETLCALAVDRYLAVTNPLRYGALVTKRCARTAVVLVWVVSAAVSFAPIMSQWWRVGADAEAQRCHSNPRCCAFASNMPYVLLSSSVSFYLPLLVMLFVYARVFVVATRQLRLLRGELGRFPPEESPPAPSRSLAPAPVGTCAPPEGVPACGRRPARLLPLREHRALCTLGLIMGTFTLCWLPFFLANVLRALGGPSLVPGPAFLALNWLGYANSAFNPLIYCRSPDFRSAFRRLLCRCGRRLPPEPCAAARPALFPSGVPAARSSPAQPRLCQRLDGASWGVS

SEQ ID NO: 1495 - protein, 761 aa, Homo sapiens
AATGTAAAAATGRLLLLLLVGSTPALALAGYIEALAANAGTGFAVAEPQIAMFCGKLNMHVNIQTGKWEPDPTGTKSCFETKEEVLQYCQEMYPELQITNVMEANQRVSIDNWCRRDKKQCKSRFVTPFKCLVGEFVSDVLLVPEKCQFFHKERMEVCENHQHWHTVVKEACLTQGMTLYSYGMLLPCGVDQFHGTEYVCCPQTKIIGSVSKEEEEEDEEEEEEEDEEEDYDVYKSEFPTEADLEDFTEAAVDEDDEDEEEGEEVVEDRDYYYDTFKGDDYNEENPTEPGSDGTMSDKEITHDVKAVCSQEAMTGPCRAVMPRWYFDLSKGKCVRFIYGGCGGNRNNFESEDYCMAVCKAMIPPTPLPTNDVDVYFETSADDNEHARFQKAKEQLEIRHRNRMDRVKKEWEEAELQAKNLPKAERQTLIQHFQAMVKALEKEAASEKQQLVETHLARVEAMLNDRRRMALENYLAALQSDPPRPHRILQALRRYVRAENKDRLHTIRHYQHVLAVDPEKAAQMKSQVMTHLHVIEERRNQSLSLLYKVPYVAQEIQEEIDELLQEQRADMDQFTASISETPVDVRVSSEESEEIPPFHPFHPFPALPENEDTQPELYHPMKKGSGVGEQDGGLIGAEEKVINSKNKVDENMVIDETLDVKEMIFNAERVGGLEEERESVGPLREDFSLSSSALIGLLVIAVAIATVIVISLVMLRKRQYGTISHGIVEVDPMLTPEERHLNKMQNHGYENPTYKYLEQMQI

SEQ ID NO: 1496 - protein, 192 aa, Homo sapiens
MASKGPSASASPENSSAGGPSGSSNGAGESGGQDSTFECNICLDTAKDAVISLCGHLFCWPCLHQWLETRPNRQVCPVCKAGISRDKVIPLYGRGSTGQQDPREKTPPRPQGQRPEPENRGGFQGFGFGDGGFQMSFGIGAFPFGIFATAFNINDGRPPPAVPGTPQYVDEQFLSRLFLFVALVIMFWLLIA

SEQ ID NO: 1497 - protein, 573 aa, Homo sapiens
MLGSLGLWALLPTAVEAPPNRRTCVFFEAPGVRGSTKTLGELLDTGTELPRAIRCLYSRCCFGIWNLTQDRAQVEMQGCRDSDEPGCESLHCDPSPRAHPSPGSTLFTCSCGTDFCNANYSHLPPPGSPGTPGSQGPQAAPGESIWMALVLLGLFLLLLLLLGSIILALLQRKNYRVRGEPVPEPRPDSGRDWSVELQELPELCFSQVIREGGHAVVWAGQLQGKLVAIKAFPPRSVAQFQAERALYELPGLQHDHIVRFITASRGGPGRLLSGPLLVLELHPKGSLCHYLTQYTSDWGSSLRMALSLAQGLAFLHEERWQNGQYKPGIAHRDLSSQNVLIREDGSCAIGDLGLALVLPGLTQPPAWTPTQPQGPAAIMEAGTQRYMAPELLDKTLDLQDWGMALRRADIYSLALLLWEILSRCPDLRPDSSPPPFQLAYEAELGNTPTSDELWALAVQERRRPYIPSTWRCFATDPDGLRELLEDCWDADPEARLTAECVQQRLAALAHPQESHPFPESCPRGCPPLCPEDCTSIPAPTILPCRPQRSACHFSVQQGPCSRNPQPACTLSPV

SEQ ID NO: 1498 - protein, 418 aa, Homo sapiens
MRLSAGPDAGPSGNSSPWWPLATGAGNTSREAEALGEGNGPPRDVRNEELAKLEIAVLAVTFAVAVLGNSSVLLALHRTPRKTSRMHLFIRHLSLADLAVAFFQVLPQMCWDITYRFRGPDWLCRVVKHLQVFGMFASAYMLVVMTADRYIAVCHPLKTLQQPARRSRLMIAAAWVLSFVLSTPQYFVFSMIEVNNVTKARDCWATFIQPWGSRAYVTWMTGGIFVAPVVILGTCYGFICYNIWCNVRGKTASRQSKGAEQAGVAFQKGFLLAPCVSSVKSISRAKIRTVKMTFVIVTAYIVCWAPFFIIQMWSVWDPMSVWTESENPTITITALLGSLNSCCNPWIYMFFSGHLLQDCVQSFPCCQNMKEKFNKEDTDSMSRRQTFYSNNRSPTNSTGMWKDSPKSSKSIKFIPVST

SEQ ID NO: 1499 - protein, 371 aa, Homo sapiens
MLMASTTSAVPGHPSLPSLPSNSSQERPLDTRDPLLARAELALLSIVFVAVALSNGLVLAALARRGRRGHWAPIHVFIGHLCLADLAVALFQVLPQLAWKATDRFRGPDALCRAVKYLQMVGMYASSYMILAMTLDRHRAICRPMLAYRHGSGAHWNRPVLVAWAFSLLLSLPQLFIFAQRNVEGGSGVTDCWACFAEPWGRRTYVTWIALMVFVAPTLGIAACQVLIFREIHASLVPGPSERPGGRRRGRRTGSPGEGAHVSAAVAKTVRMTLVIVVVYVLCWAPFFLVQLWAAWDPEAPLEGAPFVLLMLLASLNSCTNPWIYASFSSSVSSELRSLLCCARGRTPPSLGPQDESCTTASSSLAKDTSS

SEQ ID NO: 1500 - protein, 842 aa, Homo sapiens
MVTVGNYCEAEGPVGPAWMQDGLSPCFFFTLVPSTRMALGTLALVLALPCRRRERPAGADSLSWGAGPRISPYVLQLLLATLQAALPLAGLAGRVGTARGAPLPSYLLLASVLESLAGACGLWLLVVERSQARQRLAMGIWIKFRHSPGLLLLWTVAFAAENLALVSWNSPQWWWARADLGQQVQFSLWVLRYVVSGGLFVLGLWAPGLRPQSYTLQVHEEDQDVERSQVRSAAQQSTWRDFGRKLRLLSGYLWPRGSPALQLVVLICLGLMGLERALNVLVPIFYRNIVNLLTEKAPWNSLAWTVTSYVFLKFLQGGGTGSTGFVSNLRTFLWIRVQQFTSRRVELLIFSHLHELSLRWHLGRRTGEVLRIADRGTSSVTGLLSYLVFNVIPTLADIIIGIIYFSMFFNAWFGLIVFLCMSLYLTLTIVVTEWRTKFRRAMNTQENATRARAVDSLLNFETVKYYNAESYEVERYREAIIKYQGLEWKSSASLVLLNQTQNLVIGLGLLAGSLLCAYFVTEQKLQVGDYVLFGTYIIQLYMPLNWFGTYYRMIQTNFIDMENMFDLLKEETEVKDLPGAGPLRFQKGRIEFENVHFSYADGRETLQDVSFTVMPGQTLALVGPSGAGKSTILRLLFRFYDISSGCIRIDGQDISQVTQASLRSHIGVVPQDTVLFNDTIADNIRYGRVTAGNDEVEAAAQAAGIHDAIMAFPEGYRTQVGERGLKLSGGEKQRVAIARTILKAPGIILLDEATSALDTSNERAIQASLAKVCANRTTIVVAHRLSTVVNADQILVIKDGCIVERGRHEALLSRGGVYADMWQLQQGQEETSEDTKPQTMER

SEQ ID NO: 1501 - protein, 255 aa, Homo sapiens
MAAPAEPCAGQGVWNQTEPEPAATSLLSLCFLRTAGVWVPPMYLWVLGPIYLLFIHHHGRGYLWMSPLFKAKMVLGFALIVLCTSSVAVALWKIQQGTPEAPEFLIHPTVWLTTMSFAVFLIHTERKKGVQSSGVLFGYWLLCFVLPATNAAQQASGAGFQSDPVRHLSTYLCLSLVVAQFVLSCLADQPPFFPEDPQQSNPCPETGAAFPSKATFWWVSGLVWRGYRRPLRPKDLWSLGRENSSEELVSRLEKE

SEQ ID NO: 1502 - protein, 255 aa, Homo sapiens
MGDMANSSIEFHPKPQQQRDVPQAGGFGCTLAELRTLMELRGAEALQKIEEAYGDVSGLCRRLKTSPTEGLADNTNDLEKRRQIYGQNFIPPKQPKTFLQLVWEALQDVTLIILEVAAIVSLGLSFYAPPGEESEACGNVSGGAEDEGEAEAGWIEGAAILLSVICVVLVTAFNDWSKEKQFRGLQSRIEQEQKFTVIRNGQLLQVPVAALVVGDIAQVKYGDLLPADGVLIQANDLKIDESSLTGESDHVRKSA

SEQ ID NO: 1503 - protein, 204 aa, Homo sapiens
MVDQLRERTTMADPLRERTELLLADYLGYCAREPGTPEPAPSTPEAAVLRSAAARLRQIHRSFFSAYLGYPGNRFELVALMADSVLSDSPGPTWGRVVTLVTFAGTLLERGPLVTARWKKWGFQPRLKEQEGDVARDCQRLVALLSSRLMGQHRAWLQAQGGWDGFCHFFRTPFPLAFWRKQLVQAFLSCLLTTAFIYLWTRLL

SEQ ID NO: 1504 - protein, 801 aa, Homo sapiens
MWTSGRMSNAKNWLGLGMSLYFWGLMDLTTTVLSDTPTPQGELEALLSDKPQSHQRTKRSWVWNQFFVLEEYTGTDPLYVGKLHSDMDRGDGSIKYILSGEGAGIVFTIDDTTGDIHAIQRLDREERAQYTLRAQALDRRTGRPMEPESEFIIKIQDINDNEPKFLDGPYVATVPEMSPVGTSVIQVTATDADDPTYGNSARVVYSILQGQPYFSVDSKTGVIRTALMNMDREAKEYYEVIIQAKDMGGQLGGLAGTTTVNITLSDVNDNPPRFPQKHYQMSVLESAPISSTVGRVFAKDLDEGINAEMKYTIVDGDGADAFDISTDPNFQVGIITVKKPLSFESKKSYTLKVEGANPHLEMRFLNLGPFQDTTTVHISVEDVDEPPVFEPGFYFVEVPEDVAIGTTIQIISAKDPDVTNNSIRYSIDRSSDPGRFFYVDITTGALMTARPLDREEFSWHNITVLAMEMNNPSQVGSVPVTIKVLDVNDNAPEFPRFYEAFVCENAKAGQLIQTVSAVDQDDPRNGQHFYYSLAPEAANNPNFTIRDNQDNTARILTRRSGFRQQEQSVFHLPILIADSGQPVLSSTGTLTIQVCSCDDDGHVMSCSPEAYMLPVSLSRGALIAILACIFVLLVLVLLILSMRRHRKQPYIIDDEENIHENIVRYDDEGGGEEDTEAFDIAAMWNPREAQAGAAPKTRQDMLPEIESLSRYVPQTCAVNSTVHSYVLAKLYEADMDLWAPPFDSLQTYMFEGDGSVAGSLSSLQSATSDSEQSFDFLTDWGPRFRKLAELYGASEGPAPLW

SEQ ID NO: 1505 - protein, 479 aa, Homo sapiens
MEKGLTLPQDCRDFVHSLKMRSKYALFLVFVVIVFVFIEKENKIISRVSDKLKQIPQALADANSTDPALILAENASLLSLSELDSAFSQLQSRLRNLSLQLGVEPAMEAAGEEEEEQRKEEEPPRPAVAGPRRHVLLMATTRTGSSFVGEFFNQQGNIFYLFEPLWHIERTVSFEPGGANAAGSALVYRDVLKQLFLCDLYVLEHFITPLPEDHLTQFMFRRGSSRSLCEDPVCTPFVKKVFEKYHCKNRRCGPLNVTLAAEACRRKEHMALKAVRIRQLEFLQPLAEDPRLDLRVIQLVRDPRAVLASRMVAFAGKYKTWKKWLDDEGQDGLREEEVQRLRGNCESIRLSAELGLRQPAWLRGRYMLVRYEDVARGPLQKAREMYRFAGIPLTPQVEDWIQKNTQAAHDGSGIYSTQKNSSEQFEKWRFSMPFKLAQVVQAACGPAMRLFGYKLARDAAALTNRSVSLLEERGTFWVT

SEQ ID NO: 1506 - protein, 303 aa, Homo sapiens
MARRGPGWRPLLLLVLLAGAAQGGLYFRRGQTCYRPLRGDGLAPLGRSTYPRPHEYLSPADLPKSWDWRNVDGVNYASITRNQHIPQYCGSCWAHASTSAMADRINIKRKGAWPSTLLSVQNVIDCGNAGSCEGGNDLSVWDYAHQHGIPDETCNNYQAKDQECDKFNQCGTCNEFKECHAIRNYTLWRVGDYGSLSGREKMMAEIYANGPISCGIMATERLANYTGGIYAEYQDTTYINHVVSVAGWGISDGTEYWIVRNSWGEPWGERGWLRIVTSTYKDGKGARYNLAIEEHCTFGDPIV

SEQ ID NO: 1507 - protein, 255 aa, Homo sapiens
VDLAPYFTSEPLSAVQKLGGPVVLHCSAQPVTTRISWLHNGKTLDGNLEHVKIHQGTLTILSLNSSLLGYYQCLANNSIGAIVSGPATVSVAVLGDFGSSTKHVITAEEKSAGFIGCRVPESNPKAEVRYKIRGKWLEHSTENYLILPSGNLQILNVSLEDKGSYKCAAYNPVTHQLKVEPIGRKLLVSRPSSDDVHILHPTHSQALAVLSRSPVTLECVVSGVPAPQVYWLKDGQDIAPGSNWRRLYSHLATDS

SEQ ID NO: 1508 - protein, 799 aa, Homo sapiens
  VARIANT 294, 295: Xaa = Any Amino Acid
MFALGLPFLVLLVASVESHLGVLGPKNVSQKDAEFERTYVDEVNSELVNIYTFNHTVTRNRTEGVRVSVNVLNKQKGAPLLFVVRQKEAVVSFQVPLILRGMFQRKYLYQKVERTLCQPPTKNESEIQFFYVDVSTLSPVNTTYQLRVSRMDDFVLRTGEQFSFNTTAAQPQYFKYEFPEGVDSVIVKVTSNKAFPCSVISIQDVLCPVYDLDNNVAFIGMYQTMTKKAAITVQRKDFPSNSFYVVVVVKTEDQACGGSLPFYPFAEDEPVDQGHRQKTLSVLVSQAVTCECCXXAGHPRVLADSFPGSSPYEGYNYGSFENVSGSTDGLVDSAGTGDLSYGYQGHDQFKRRLPSGQMRQLCIAMGRSFEPVGTRPRVDSMSSVEEDDYDTLTDIDSDKNVIRTKQYLYVADLARKDKRVLRKKYQIYFWNIATIAVFYALPVVQLVITYQTVVNVTGNQDICYYNFLCAHPLGNLSAFNNILSNLGYILLGLLFLLIILQREINHNRALLRNDLCALECGIPKHFGLFYAMGTALMMEGLLSACYHVCPNYTNFQFDTSFMYMIAGLCMLKLYQKRHPDINASAYSAYACLAIVIFFSVLGVVFGKGNTAFWIVFSIIHIIATLLLSTQLYYMGRWKLDSGIFRRILHVLYTDCIRQCSGPLYVDRMVLLVMGNVINWSLAAYGLIMRPNDFASYLLAIGICNLLLYFAFYIIMKLRSGERIKLIPLLCIVCTSVVWGFALFFFFQGLSTWQKTPAESREHNRDCILLDFFDDHDIWHFLSSIAMFGSFLVSGPPGRA

SEQ ID NO: 1509 - protein, 443 aa, Homo sapiens
MAASPHTLSSRLLTGCVGGSVWYLERRTIQDSPHKFLHLLRNVNKQWITFQHFSFLKRMYVTQLNRSHNQQVRPKPEPVASPFLEKTSSGQAKAEIYEMRPLSPPSLSLSRKPNEKELIELEPDSVIEDSIDVGKETKEEKRWKEMKLQVYDLPGILARLSKIKLTALVVSTTAAGFALAPGPFDWPCFLLTSVGTGLASCAANSINQFFEVPFDSNMNRTKNRPLVRGQISPLLAVSFATCCAVPGVAILTLGVNPLTGALGLFNIFLYTCCYTPLKRISIANTWVGAVVGAIPPVMGWTAATGSLDAGAFLLGGILYSWQFPHFNALSWGLREDYSRGGYCMMSVTHPGLCRRVALRHCLALLVLSAAAPVLDITTWTFPIMALPINAYISYLGFRFYVDADRRSSRRLFFCSLWHLPLLLLLMLTCKRPSGGGDAGPPPS

SEQ ID NO: 1510 - protein, 439 aa, Homo sapiens
RLLCLQALLLLGLNPVSASLQDQHCESLSLASNISGLQCNASVDLIGTCWPRSPAGQLVVRPCPAFFYGVRYNTTNNGYRECLANGSWAARVNYSECQEILNEEKKSKVHYHVAVIINYLGHCISLVALLVAFVLFLRLRPGCTHWGDQADGALEVGAPWSGAPFQVRRSIRCLRNIIHWNLISAFILRNATWFVVQLTMSPEVHQSNVGWCRLVTAAYNYFHVTNFFWMFGEGCYLHTAIVLTYSTDRLRKWMFICIGWGVPFPIIVAWAIGKLYYDNEKCWFGKRPGVYTDYIYQGPMILVLLINFIFLFNIVRILMTKLRASTTSETIQYRKAVKATLVLLPLLGITYMLFFVNPGEDEVSRVVFIYFNSFLESFQGFFVSVFYCFLNSEVRSAIRKRWHRWQDKHSIRARVARAMSIPTSPTRVSFHSIKQSTAV

SEQ ID NO: 1511 - protein, 547 aa, Homo sapiens
MVPKADSGAFLLLFLLVLTVTEPLRPELRCNPGQFACRSGTIQCIPLPWQCDGWATCEDESDEANCPEVTGEVRPHHGKEAVDPRQGRARGGDPSHFHAVNVAQPVRFSRKCPTGWHHYEGTASCYRVYLSGENYWDAAQTCQRLNGSLATFSTDQELRFVLAQEWDQPERSFGWKDQRKLWVGYQYVITGRNRSLEGRWEVAFKGSSEVFLPPDPIFASAMSENDNVFCAQLQCFHFPTLRHHDLHSWHAESCYEKSSFLCKRSQTCVDIKDNVVDEGFYFTPKGDDPCLSCTCHGGEPEMCVAALCERPQGCQQYRKDPKECCKFMCLDPDGNSLFDSMASGMRLVVSCISSFLILSLLLFMVHRLRQRRRERIESLIGANLHHFNLGRRIPGFDYGPDGFGTGLTPLHLSDDGEGGTFHFHDPPPPYTAYKYPDIGQPDDPPPPYEASIHPDSVFYDPADDDAFEPVEVSLPAPGDGGSEGALLRRLEQPLPTAGASLADLEDSADSSSALLVPPDPAQSGSTPAAEALPGGGRHSRSSLNTVV

SEQ ID NO: 1512 - protein, 519 aa, Homo sapiens
MSPLWWGFLLSCLGCKILPGAQGQFPRVCMTVDSLVNKECCPRLGAESANVCGSQQGRGQCTEVRADTRPWSGPYILRNQDDRELWPRKFFHRTCKCTGNFAGYNCGDCKFGWTGPNCERKKPPVIRQNIHSLSPQEREQFLGALDLAKKRVHPDYVITTQHWLGLLGPNGTQPQFANCSVYDFFVWLHYYSVRDTLLGPGRPYRAIDFSHQGPAFVTWHRYHLLCLERDLQRLIGNESFALPYWNFATGRNECDVCTDQLFGAARPDDPTLISRNSRFSSWETVCDSLDDYNHLVTLCNGTYEGLLRRNQMGRNSMKLPTLKDIRDCLSLQKFDNPPFFQNSTFSFRNALEGFDKADGTLDSQVMSLHNLVHSFLNGTNALPHSAANDPIFVVLHSFTDAIFDEWMKRFNPPADAWPQELAPIGHNRMYNMVPFFPPVTNEELFLTSDQLGYSYAIDLPVSVEETPGWPTTLLVVMGTLVALVGLFVLLAFLQYRRLRKGYTPLMETHLSSKRYTEEA

SEQ ID NO: 1513 - protein, 133 aa, Homo sapiens
MGYPEVERRELLPAAAPRERGSQGCGCGGAPARAGEGNSCLLFLGFFGLSLALHLLTLCCYLELRSELRRERGAESRLGGSGTPGTSGTLSSLGGLDPDSPITSHLGQPSPKQQPLEPGEAALHSDSQDGHQV

SEQ ID NO: 1514 - protein, 410 aa, Homo sapiens
MAGKVRSLLPPLLLAAAGLAGLLLLCVPTRDVREPPALKYGIVLDAGSSHTSMFIYKWPADKENDTGIVGQHSSCDVPGGGISSYADNPSGASQSLVGCLEQALQDVPKERHAGTPLYLGATAGMRLLNLTNPEASTSVLMAVTHTLTQYPFDFRGARILSGQEEGVFGWVTANYLLENFIKYGWVGRWFRPRKGTLGAMDLGGASTQITFETTSPAEDRASEVQLHLYGQHYRVYTHSFLCYGRDQVLQRLLASALQTHGFHPCWPRGFSTQVLLGDVYQSPCTMAQRPQNFNSSARVSLSGSSDPHLCRDLVSGLFSFSSCPFYRCSFNGVFQPPPRPSPQAADTAVGWALGYMLNLTNLIPADPPGLRKGTDFSSWVVLLLLFASALLAALVLLLRQVHSAKLPSTI

SEQ ID NO: 1515 - protein, 353 aa, Homo sapiens
MGSLYSEYLNPNKVQEHYNYTKETLETQETTSRQVASAFIVILCCAIVVENLLVLIAVARNSKFHSAMYLFLGNLAASDLLAGVAFVANTLLSGSVTLRLTPVQWFAREGSAFITLSASVFSLLAIAIERHVAIAKVKLYGSDKSCRMLLLIGASWLISLVLGGLPILGWNCLGHLEACSTVLPLYAKHYVLCVVTIFSIILLAIVALYVRIYCVVRSSHADMAAPQTLALLKTVTIVLGVFIVCWLPAFSILLLDYACPVHSCPILYKAHYFFAVSTLNSLLNPVIYTWRSRDLRREVLRPLQCWRPGVGVQGRRRGGTPGHHLLPLRSSSSLERGMHMPTSPTFLEGNTVV

SEQ ID NO: 1516 - protein, 770 aa, Homo sapiens
MRGVWPPPVSALLSALGMSTYKRATLDEEDLVDSLSEGDAYPNGLQVNFHSPRSGQRCWAARTQVEKRLVVLVVLLAAGLVACLAALGIQYQTRSPSVCLSEACVSVTSSILSSMDPTVDPCHDFFSYACGGWIKANPVPDGHSRWGTFSNLWEHNQAIIKHLLENSTASVSEAERKAQVYYRACMNETRIEELRAKPLMELIERLGGWNITGPWAKDNFQDTLQVVTAHYRTSPFFSVYVSADSKNSNSNVIQVDQSGLGLPSRDYYLNKTENEKVLTGYLNYMVQLGKLLGGGDEEAIRPQMQQILDFETALANITIPQEKRRDEELIYHKVTAAELQTLAPAINWLPFLNTIFYPVEINESEPIVVYDKEYLEQISTLINTTDRCLLNNYMIWNLVRKTSSFLDQRFQDADEKFMEVMYGTKKTCLPRWKFCVSDTENNLGFALGPMFVKATFAEDSKSIATEIILEIKKAFEESLSTLKWMDEETRKSAKEKADAIYNMIGYPNFIMDPKELDKVFNDYTAVPDLYFENAMRFFNFSWRVTADQLRKAPNRDQWSMTPPMVNAYYSPTKNEIVFPAGILQAPFYTRSSPKALNFGGIGVVVGHELTHAFDDQGREYDKDGNLRPWWKNSSVEAFKRQTECMVEQYSNYSVNGEPVNGRHTLGENIADNGGLKAAYRAYQNWVKKNGAEHSLPTLGLTNNQLFFLGFAQVWCSVRTPESSHEGLITDPHSPSRFRVIGSLSNSKEFSEHFRCPPGSPMNPPHKCEVW

SEQ ID NO: 1517 - protein, 788 aa, Homo sapiens
MQARHAHVPQLRWETMDVRKLDFPSASFDVVLEKGTLDALLAGERDPWTVSSEGVHTVDQVLSEVGFQKGTRQLLGSRTQLELVLAGASLLLAALLLGCLVALGVQYHRDPSHSTCLTEACIRVAGKILESLDRGVSPCEDFYQFSCGGWIRRNPLPDGRSRWNTFNSLWDQNQAILKHLLENTTFNSSSEAEQKTQRFYLSCLQVERIEELGAQPLRDLIEKIGGWNITGPWDQDNFMEVLKAVAGTYRATPFFTVYISADSKSSNSNVIQVDQSGLFLPSRDYYLNRTANEKVLTAYLDYMEELGMLLGGRPTSTREQMQQVLELEIQLANITVPQDQRRDEEKIYHKMSISELQALAPSMDWLEFLSFLLSPLELSDSEPVVVYGMDYLQQVSELINRTEPSILNNYLIWNLVQKTTSSLDRRFESAQEKLLETLYGTKKSCVPRWQTCISNTDDALGFALGSLFVKATFDRQSKEIAEGMISEIRTAFEEALGQLVWMDEKTRQAAKEKVSDAIYDMIGFPDFILEPKELDDVYDGYEISEDSFFQNMLNLYNFSAKVMADQLRKPPSRDQWSMTPQTVNAYYLPTKNEIVFPAGILQAPFYARNHPKALNFGGIGVVMGHELTHAFDDQGREYDKEGNLRPWWQNESLAAFRNHTACMEEQYNQYQVNGERLNGRQTLGENIADNGGLKAAYNAYKAWLRKHGEEQQLPAVGLTNHQLFFVGFAQVWCSVRTPESSHEGLVTDPHSPARFRVLGTLSNSRDFLRHFGCPVGSPMNPGQLCEVW

SEQ ID NO: 1518 - protein, 208 aa, Homo sapiens
MALGQKLFITMSRGAGRLQGTLWALVFLGILVGMVVPSPAGTRANNTLLDSRGWGTLLSRSRAGLAGEIAGVNWESGYLVGIKRQRRLYCNVGIGFHLQVLPDGRISGTHEENPYSLLEISTVERGVVSLFGVRSALFVAMNSKGRLYATPSFQEECKFRETLLPNNYNAYESDLYQGTYIALSKYGRVKRGSKVSPIMTVTHFLPRI

SEQ ID NO: 1519 - protein, 410 aa, Homo sapiens
SELHPICNKSILRQEVDYMTQARGQRSSLAEDNESSYSRGFDMTYTEFDYDLCNEVVDVTCSPKPDAFNPCEDIMGYNILRVLIWFISILAITGNIIVLVILTTSQYKLTVPRFLMCNLAFADLCIGIYLLLIASVDIHTKSQYHNYAIDWQTGAGCDAAGFFTVFASELSVYTLTAITLERWHTITHAMQLDCKVQLRHAASVMVMGWIFAFAAALFPIFGISSYMKVSICLPMDIDSPLSQLYVMSLLVLNVLAFVVICGCYIHIYLTVRNPNIVSSSSDTRIAKRMAMLIFTDFLCMAPISFFAISASLKVPLITVSKAKILLVLFHPINSCANPFLYAIFTKNFRRDFFILLSKCGCYEMQAQIYRTETSSTVHNTHPRNGHCSSAPRVTSGSTYILVPLSHLAQN

SEQ ID NO: 1520 - protein, 374 aa, Homo sapiens
MDPLGPAKPQWLWRRCLAGLLFQLLVAVCFFSYLRVSRDDATGSPRPGLMAVEPVTGAPNGSRCQDSMATPAHPTLLILLWTWPFNTPVALPRCSEMVPGAADCNITADSSVYPQADAVIVHHWDIMYNPSANLPPPTRPQGQRWIWFSMESPSNCRHLEALDGYFNLTMSYRSDSDIFTPYGWLEPWSGQPAHPPLNLSAKTELVAWAVSNWKPDSARVRYYQSLQAHLKVDVYGRSHKPLPKGTMMETLSRYKFYLAFENSLHPDYITEKLWRNALEAWAVPVVLGPSRSNYERFLPPDAFIHVDDFQSPKDLARYLQELDKDHARYLSYFHWRETLRPRSFSWALAFCKACWKLQQESRYQTVRSIAAWFT

SEQ ID NO: 1521 - protein, 495 aa, Homo sapiens
MRLTRCQAALAAAITLNLLVLFYVSWLQHQPRNSRARGPRRASAAGPRVTVLVREFEAFDNAVPELVDSFLQQDPAQPVVVAADTLPYPPLALPRIPNVRLALLQPALDRPAAASRPETYVATEFVALVPDGARAEAPGLLERMVEALRAGSARLVAAPVATANPARCLALNVSLREWTARYGAAPAAPRCDALDGDAVVLLRARDLFNLSAPLARPVGTSLFLQTALRGWAVQLLDLTFAAARQPPLATAHARWKAEREGRARRAALLRALGIRLVSWEGGRLEWFGCNKETTRCFGTVVGDTPAYLYEERWTPPCCLRALRETARYVVGVLEAAGVRYWLEGGSLLGAARHGDIIPWDYDVDLGIYLEDVGNCEQLRGAEAGSVVDERGFVWEKAVEGDFFRVQYSESNHLHVDLWPFYPRNGVMTKDTWLDHRQDVEFPEHFLQPLVPLPFAGFVAQAPNNYRRFLELKFGPGVIENPQYPNPALLSLTGSG

SEQ ID NO: 1522 - protein, 319 aa, Homo sapiens
MPFPNCSAPSTVVATAVGVLLGLECGLGLLGNAVALWTFLFRVRVWKPYAVYLLNLALADLLLAACLPFLAAFYLSLQAWHLGRVGCWALHFLLDLSRSVGMAFLAAVALDRYLRVVHPRLKVNLLSPQAALGVSGLVWLLMVALTCPGLLISEAAQNSTRCHSFYSRADGSFSIIWQEALSCLQFVLPFGLIVFCNAGIIRALQKRLREPEKQPKLQRAQALVTLVVVLFALCFLPCFLARVLMHIFQNLGSCRALCAVAHTSDVTGSLTYLHSVLNPVVYCFSSPTFRSSYRRVFHTLRGKGQAAEPPDFNPRDSYS

SEQ ID NO: 1523 - protein, 395 aa, Homo sapiens
MSANATLKPLCPILEQMSRLQSHSNTSIRYIDHAAVLLHGLASLLGLVENGVILFVVGCRMRQTVVTTWVLHLALSDLLASASLPFFTYFLAVGHSWELGTTFCKLHSSIFFLNMFASGFLLSAISLDRCLQVVRPVWAQNHRTVAAAHKVCLVLWALAVLNTVPYFVFRDTISRLDGRIMCYYNVLLLNPGPDRDATCNSRQAALAVSKFLLAFLVPLAIIASSHAAVSLRLQHRGRRRPGRFVRLVAAVVAAFALCWGPYHVFSLLEARAHANPGLRPLVWRGLPFVTSLAFFNSVANPVLYVLTCPDMLRKLRRSLRTVLESVLVDDSELGGAGSSRRRRTSSTARSASPLALCSRPEEPRGPARLLGWLLGSCAASPQTGPLNRALSSTSS

SEQ ID NO: 1524 - protein, 372 aa, Homo sapiens
MACNSTSLEAYTYLLLNTSNASDSGSTQLPAPLRISLAIVMLLMTVVGFLGNTVVCIIVYQRPAMRSAINLLLATLAFSDIMLSLCCMPFTAVTLITVRWHFGDHFCRLSATLYWFFVLEGVAILLIISVDRFLIIVQRQDKLNPRRAKVIIAVSWVLSFCIAGPSLTGWTLVEVPARAPQCVLGYTELPADRAYVVTLVVAVFFAPFGVMLCAYMCILNTVRKNAVRVHNQSDSLDLRQLTRAGLRRLQRQQQVSVDLSFKTKAFTTILILFVGFSLCWLPHSVYSLLSVFSQRFYCGSSFYATSTCVLWLSYLKSVFNPIVYCWRIKKFREACIELLPQTFQILPKVPERIRRRIQPSTVYVCNENQSAV

SEQ ID NO: 1525 - protein, 617 aa, Homo sapiens
MGPTLAVPTPYGCIGCKLPQPEYPPALIIFMFCAMVITIVVDLIGNSMVILAVTKNKKLRNSGNIFVVSLSVADMLVAIYPYPLMLHAMSIGGWDLSQLQCQMVGFITGLSVVGSIFNIVAIAINRYCYICHSLQYERIFSVRNTCIYLVITWIMTVLAVLPNMYIGTIEYDPRTYTCIFNYLNNPVFTVTIVCIHFVLPLLIVGFCYVRIWTKVLAARDPAGQNPDNQLAEVRNFLTMFVIFLLFAVCWCPINVLTVLVAVSPKEMAGKIPNWLYLAAYFIAYFNSCLNAVIYGLLNENFRREYWTIFHAMRHPIIFFSGLISDIREMQEARTLARARAHARDQAREQDRAHACPAVEETPMNVRNVPLPGDAAAGHPDRASGHPKPHSRSSSAYRKSASTHHKSVFSHSKAASGHLKPVSGHSKPASGHPKSATVYPKPASVHFKADSVHFKGDSVHFKPDSVHFKPASSNPKPITGHHVSAGSHSKSAFSAATSHPKPTTGHIKPATSHAEPTTADYPKPATTSHPKPTAADNPELSASHCPEIPAIAHPVSDDSDLPESASSPAAGPTKPAASQLESDTIADLPDPTVVTTSTNDYHDVVVIDVEDDPDEMAV

SEQ ID NO: 1526 - protein, 345 aa, Homo sapiens
MYKDCIESTGDYFLLCDAEGPWGIILESLAILGIVVTILLLLAFLFLMRKIQDCSQWNVLPTQLLFLLSVLGLFGLAFAFIIELNQQTAPVRYFLFGVLFALCFSCLLAHASNLVKLVRGCVSFSWTTILCIAIGCSLLQIIIATEYVTLIMTRGMMFVNMTPCQLNVDFVVLLVYVLFLMALTFFVSKATFCGPCENWKQHGRLIFITVLFSIIIWVVWISMLLRGNPQFQRQPQWDDPVVCIALVTNAWVFLLLYIVPELCILYRSCRQECPLQGNACPVTAYQHSFQVENQELSRARDSDGAEEDVALTSYGTPIQPQTVDPTQECFIPQAKLSPQQDAGGV

SEQ ID NO: 1527 - protein, 368 aa, Homo sapiens
MADAQNISLDSPGSVGAVAVPVVFALIFLLGTVGNGLVLAVLLQPGPSAWQEPGSTTDLFILNLAVADLCFILCCVPFQATIYTLDAWLFGALVCKAVHLLIYLTMYASSFTLAAVSVDRYLAVRHPLRSRALRTPRNARAAVGLVWLLAALFSAPYLSYYGTVRYGALELCVPAWEDARRRALDVATFAAGYLLPVAVVSLAYGRTLRFLWAAVGPAGAAAAEARRRATGRAGRAMLAVAALYALCWGPHHALILCFWYGRFAFSPATYACRLASHCLAYANSCLNPLVYALASRHFRARFRRLWPCGRRRRHRARRALRRVRPASSGPPGCPGDARPSGRLLAGGGQGPEPREGPVHGGEAARGPE

SEQ ID NO: 1528 - protein, 466 aa, Homo sapiens
MTTSPILQLLLRLSLCGLLLQRAETGSKGQTAGELYQRWERYRRECQETLAAAEPPSGLACNGSFDMYVCWDYAAPNATARASCPWYLPWHHHVAAGFVLRQCGSDGQWGLWRDHTQCENPEKNEAFLDQRLILERLQVMYTVGYSLSLATLLLALLILSLFRRLHCTRNYIHINLFTSFMLRAAAILSRDRLLPRPGPYLGDQALALWNQALAACRTAQIVTQYCVGANYTWLLVEGVYLHSLLVLVGGSEEGHFRYYLLLGWGAPALFVIPWVIVRYLYENTQCWERNEVKAIWWIIRTPILMTILINFLIFIRILGILLSKLRTRQMRCRDYRLRLARSTLTLVPLLGVHEVVFAPVTEEQARGALRFAKLGFEIFLSSFQGFLVSVLYCFINKEVQSEIRRGWHHCRLRRSLGEEQRQLPERAFRALPSGSGPGEVPTSRGLSSGTLPGPGNEASRELESYC

SEQ ID NO: 1529 - protein, 463 aa, Homo sapiens
MAGAPGPLRLALLLLGMVGRAGPRPQGATVSLWETVQKWREYRRQCQRSLTEDPPPATDLFCNRTFDEYACWPDGEPGSFVNVSCPWYLPWASSVPQGHVYRFCTAEGLWLQKDNSSLPWRDLSECEESKRGERSSPEEQLLFLYIIYTVGYALSFSALVIASAILLGFRHLHCTRNYIHLNLFASFILRALSVFIKDAALKWMYSTAAQQHQWDGLLSYQDSLSCRLVFLLMQYCVAANYYWLLVEGVYLYTLLAFSVLSEQWIFRLYVSIGWGVPLLFVVPWGIVKYLYEDEGCWTRNSNMNYWLIIRLPILFAIGVNFLIFVRVICIVVSKLKANLMCKTDIKCRLAKSTLTLIPLLGTHEVIFAFVMDEHARGTLRFIKLFTELSFTSFQGLMVAILYCFVNNEVQLEFRKSWERWRLEHLHIQRDSSMKPLKCPTSSLSSGATAGSSMYTATCQASCS

SEQ ID NO: 1530 - protein, 894 aa, Homo sapiens
MARQKKMGQSVLRAVFFLVLGLLGHSHGGFPNTISIGGLFMRNTVQEHSAFRFAVQLYNTNQNTTEKPFHLNYHVDHLDSSNSFSVTNAFCSQFSRGVYAIFGFYDQMSMNTLTSFCGALHTSFVTPSFPTDADVQFVIQMRPALKGAILSLLGHYKWEKFVYLYDTERGFSILQAIMEAAVQNNWQVTARSVGNIKDVQEFRRIIEEMDRRQEKRYLIDCEVERINTILEQVVILGKHSRGYHYMLANLGFTDILLERVMHGGANITGFQIVNNENPMVQQFIQRWVRLDEREFPEAKNAPLKYTSALTHDAILVIAEAFRYLRRQRVDVSRRGSAGDCLANPAVPWSQGIDIERALKMVQVQGMTGNIQFDTYGRRTNYTIDVYEMKVSGSRKAGYWNEYERFVPFSDQQISNDSASSENRTIVVTTILESPYVMYKKNHEQLEGNERYEGYCVDLAYEIAKHVRIKYKLSIVGDGKYGARDPETKIWNGMVGELVYGRADIAVAPLTITLVREEVIDFSKPFMSLGISIMIKKPQKSKPGVFSFLDPLAYEIWMCIVFAYIGVSVVLFLVSRFSPYEWHLEDNNEEPRDPQSPPDPPNEFGIFNSLWFSLGAFMQQGCDISPRSLSGRIVGGVWWFFTLIIISSYTANLAAFLTVERMVSPIESAEDLAKQTEIAYGTLDSGSTKEFFRRSKIAVYEKMWSYMKSAEPSVFTKTTADGVARVRKSKGKFAFLLESTMNEYIEQRKPCDTMKVGGNLDSKGYGVATPKGSALRNAVNLAVLKLNEQGLLDKLKNKWWYDKGECGSGGGDSKDKTSALSLSNVAGVFYILVGGLGLAMMVALIEFCYKSRAESKRMKLTKNTQNFKPAPATNTQNYATYREGYNVYGTESVKI

SEQ ID NO: 1531 - protein, 727 aa, Homo sapiens
MAFQKAVKGTILVGGGALATVLGLSQFAHYRRKQMNLAYVKAADCISEPVNREPPSREAQLLTLQNTSEFDILVIGGGATGSGCALDAVTRGLKTALVERDDFSSGTSSRSTKLIHGGVRYLQKAIMKLDIEQYRMVKEALHERANLLEIAPHLSAPLPIMLPVYKWWQLPYYWVGIKLYDLVAGSNCLKSSYVLSKSRALEHFPMLQKDKLVGAIVYYDGQHNDARMNLAIALTAARYGAATANYMEVVSLLKKTDPQTGKVRVSGARCKDVLTGQEFDVRAKCVINATGPFTDSVRKMDDKDAAAICQPSAGVHIVMPGYYSPESMGLLDPATSDGRVIFFLPWQKMTIAGTTDTPTDVTHHPIPSEEDINFILNEVRNYLSCDVEVRRGDVLAAWSGIRPLVTDPKSADTQSISRNHVVDISESGLITIAGGKWTTYRSMAEDTINAAVKTHNLKAGPSRTVGLFLQGGKDWSPTLYIRLVQDYGLESEVAQHLAATYGDKAFEVAKMASVTGKRWPIVGVRLVSEFPYIEAEVKYGIKEYACTAVDMISRRTRLAFLNVQAAEEALPRIVELMGRELNWDDYKKQEQLETARKFLYYEMGYKSRSEQLTDRSEISLLPSDIDRYKKRFHKFDADQKGFITIVDVQRVLESINVQMDENTLHEILNEVDLNKNGQVELNEFLQLMSAIQKGRVSGSRLAILMKTAEENLDRRVPIPVDRSCGGL

SEQ ID NO: 1532 - protein, 452 aa, Homo sapiens
MNRQLVNILTALFAFFLETNHFRTAFCKDHDSRSGKQPSQTLSPSDFLDKLMGRTSGYDARIRPNFKGPPVNVTCNIFINSFGSIAETTMDYRVNIFLRQQWNDSRLAYSEYPDDSLDLDPSMLDSIWKPDLFFANEKGANFHDVTTDNKLLRISKNGKVLYSIRLTLTLSCPMDLKNFPMDVQTCTMQLESFGYTMNDLIFEWLSDGPVQVAEGLTLPQFILKEEKELGYCTKHYNTGKFTCIEVKFHLERQMGYYLIQMYIPSLLIVILSWVSFWINMDAAPARVALGITTVLTMTTQSSGSRASLPKVSYVKAIDIWMAVCLLFVFAALLEYAAVNFVSRQHKEFLRLRRRQKRQNKEEDVTRESRFNFSGYGMGHCLQVKDGTAVKATPANPLPQPPKDGDAIKKKFVDRAKRIDTISRAAFPLAFLIFNIFYWITYKIIRHEDVHKK

SEQ ID NO: 1533 - protein, 560 aa, Homo sapiens
MLRGTLLCAVLGLLRAQPFPCPPACKCVFRDAAQCSGGDVARISALGLPTNLTHILLFGMGRGVLQSQSFSGMTVLQRLMISDSHISAVAPGTFSDLIKLKTLRLSRNKITHLPGALLDKMVLLEQLFLDHNALRGIDQNMFQKLVNLQELALNQNQLDFLPASLFTNLENLKLLDLSGNNLTHLPKGLLGAQAKLERLLLHSNRLVSLDSGLLNSLGALTELQFHRNHIRSIAPGAFDRLPNLSSLTLSRNHLAFLPSALFLHSHNLTLLTLFENPLAELPGVLFGEMGGLQELWLNRTQLRTLPAAAFRNLSRLRYLGVTLSPRLSALPQGAFQGLGELQVLALHSNGLTALPDGLLRGLGKLRQVSLRRNRLRALPRALFRNLSSLESVQLDHNQLETLPGDVFGALPRLTEVLLGHNSWRCDCGLGPFLGWLRQHLGLVGGEEPPRCAGPGAHAGLPLWALPGGDAECPGPRGPPPRPAADSSSEAPVHPALAPNSSEPWVWAQPVTTGKGQDHSPFWGFYFLLLAVQAMITVIIVFAMIKIGQLFRKLIRERALG

SEQ ID NO: 1534 - protein, 409 aa, Homo sapiens
RRRAGGRTMVERASKFVLVVAGSVCFMLILYQYAGPGLSLGAPGGRAPPDDLDLFPTPDPHYEKKYYFPVRELERSLRFDMKGDDVIVFLHIQKTGGTTFGRHLVQNVRLEVPCDCRPGQKKCTCYRPNRRETWLFSRFSTGWSCGLHADWTELTNCVPGVLDRRDSAALRTPRKFYYITLLRDPVSRYLSEWRHVQRGATWKTSLHMCDGRTPTPEELPPCYEGTDWSGCTLQEFMDCPYNLANNRQVRMLADLSLVGCYNLSFIPEGKRAQLLLESAKKNLRGMAFFGLTEFQRKTQYLFERTFNLKFIRPFMQYNSTRAGGVEVDEDTIRRIEELNDLDMQLYDYAKDLFQQRYQYKRQLERREQRLRSREERLLHRAKEALPREDADEPGRVPTEDYMSHIIEKW

SEQ ID NO: 1535 - protein, 487 aa, Homo sapiens
MSLPNSSCLLEDKMCEGNKTTMASPQLMPLVVVLSTICLVTVGLNLLVLYAVRSERKLHTVGNLYIVSLSVADLIVGAVVMPMNILYLLMSKWSLGRPLCLFWLSMDYVASTASIFSVFILCIDRYRSVQQPLRYLKYRTKTRASATILGAWFLSFLWVIPILGWNHFMQQTSVRREDKCETDFYDVTWFKVMTAIINFYLPTLLMLWFYAKIYKAVRQHCQHRELINRSLPSFSEIKLRPENPKGDAKKPGKESPWEVLKRKPKDAGGGSVLKSPSQTPKEMKSPVVFSQEDDREVDKLYCFPLDIVHMQAAAEGSSRDYVAVNRSHGQLKTDEQGLNTHGASEISEDQMLGDSQSFSRTDSDTTTETAPGKGKLRSGSNTGLDYIKFTWKRLRSHSRQYVSGLHMNRERKAAKQLGFIMAAFILCWIPYFIFFMVIAFCKNCCNEHLHMFTIWLGYINSTLNPLIYPLCNENFKKTFKRILHIRS

SEQ ID NO: 1536 - protein, 411 aa, Homo sapiens
MDGSHSAALKLQQLPPTSSSSAVSEASFSYKARAFLGNLIGALLAIFGHLVVSIALNLQKYCHIRLAGSKDPRAYFKTKTWWLGLFLMLLGELGVFASYAFAPLSLIVPLSAVSVIASAIIGIIFIKEKWKPKDFLRRYVLSFVGCGLAVVGTYLLVTFAPNSHEKMTGENVTRHLVSWPFLLYMLVEIILFCLLLYFYKEKNANNIVVILLLVALLGSMTVVTVKAVAGMLVLSIQGNLQLDYPIFYVMFVCMVATAVYQAAFLSQASQMYDSSLIASVGYILSTTIAITAGAIFYLDFIGEDVLHICMFALGCLIAFLGVFLITRNRKKPIPFEPYISMDAMPGMQNMHDKGMTVQPELKASFSYGALENNDNISEIYAPATLPVMQEEHGSRSASGVPYRVLEHTKKE

SEQ ID NO: 1537 - protein, 524 aa, Homo sapiens
MGKPARKGCEWKRFLKNNWVLLSTVAAVVLGITTGVLVREHSNLSTLEKFYFAFPGEILMRMLKLIILPLIISSMITGVAALDSNVSGKIGLRAVVYYFCTTLIAVILGIVLVVSIKPGVTQKVGEIARTGSTPEVSTVDAMLDLIRNMFPENLVQACFQQYKTKREEVKPPSDPEMNMTEESFTAVMTTAISKNKTKEYKIVGMYSDGINVLGLIVFCLVFGLVIGKMGEKGQILVDFFNALSDATMKIVQIIMCYMPLGILFLIAGKIIEVEDWEIFRKLGLYMATVLTGLAIHSIVILPLIYFIVVRKNPFRFAMGMAQALLTALMISSSSATLPVTFRCAEENNQVDKRITRFVLPVGATINMDGTALYEAVAAVFIAQLNDLDLGIGQIITISITATSASIGAAGVPQAGLVTMVIVLSAVGLPAEDVTLIIAVDWLLDRFRTMVNVLGDAFGTGIVEKLSKKELEQMDVSSEVNIVNPFALESTILDNEDSDTKKSYVNGGFAVDKSDTISFTQTSQF

SEQ ID NO: 1538 - protein, 255 aa, Homo sapiens
ERVEYLFLIIFTVEAFLKVIAYGLLFHPNAYLRNGWNLLDFIIVVVGLFSAILEQATKADGANALGGKGAGFDVKALRAFRVLRPLRLVSGVPSLQVVLNSIIKAMVPLLHIALLVLFVIIIYAIIGLELFMGKMHKTCYNQEGIADVPAEDDPSPCALETGHGRQCQNGTVCKPGWDGPKHGITNFDNFAFAMLTVFQCITMEGWTDVLYWVNDAVGRDWPWIYFVTLIIIGSFFVLNLVLGVLSGEFSKEREK

SEQ ID NO: 1539 - protein, 296 aa, Homo sapiens
MHVFIDEHGEIRSCYLKSGNQKEGPLQPLPSNNDCLSQAREMQVSSSSTTTSESQDPSSGDPAVSALQQQLLLMVARRTQSETPRHVSQDLEASSCSSTQGKFNREQFYKFIIFPGKWIKVWYDRLTLLALLDRTEDIKENVLAILLIVLVSLLGFLTLSQGFCKDMWVLLFCLVMASCQYSLLKARPHLILTSSVVQPDPASPIHGHNQIITYSRPIYFCVLCGLILLLDTGAKARHPPSYVVYGLKLFSPVFLQSARDYLIGKIMNSHKDFFTSEKKKDKIISAISSVIFLKSW

SEQ ID NO: 1540 - protein, 307 aa, Homo sapiens
MHVCLCVWVHICVCVPVCVGAHLCVWVHICVCVRLCGCTFVCVCACVCACVCGCLCVWGTFVCVCACVWVHICVCASVCVPVCGGAHLCVRLCVGVHICVCACVCGCTFVCVCACVCGCLCVCGAHLCVCVCLCVGAHLCVCLCVCACVWGCTFVCVCACVWGCTFVCVCACVCGCTFVCVCACVCGCTFVCVCLCVWVHICVCVCLCVWVHICVCACVWVHICVCVPVCVCLCVWVHICVCVCLCVWVHICVCVCACVCVAGPGCQTLNKRRKTSVFILLVGRWSRNTWMESALQERCLCLWRGPW

SEQ ID NO: 1541 - protein, 161 aa, Homo sapiens
MAVILGIFGTVQYRSRYLILYAAWLVLWVGWNAFIICFYLEVGQLSQDRDFIMTFNTSLHRSWWMENGPGCLVTPVLNSRLALEDHHVISVTGCLLDYPYIEALSSALQIFLALFGFVFACYVSKVFLEEEDSFDFIGGFDSYGYQAPQKTSHLQLQPLYT

SEQ ID NO: 1542 - protein, 570 aa, Homo sapiens
MRPDSPTMAAPAESLRRRKTGYSDPEPESPPAPGRGPAGSPAHLHTGTFWLTRIVLLKALAFVYFVAFLVAFHQNKQLIGDRGLLPCRVFLKNFQQYFQDRTSWEVFSYMPTILWLMDWSDMNSNLDLLALLGLGISSFVLITGCANMLLMAALWGLYMSLVNVGHVWQRWCLLGWESQLLETGFLGIFLCPLWTLSRLPQHTPTSRIVLWGFRWLIFRIMLGAGLIKIRGDRCWRDLTCMDFHYETQPMPNPVAYYLHHSPWWFHRFETLSNHFIELLVPFFLFLGRRACIIHGVLQILFQAVLIVSGNLSFLNWLTMVPSLACFDDATLGFLFPSGPGSLKDRVLQMQRDIRGARPEPRFGSVVRRAANVSLGVLLAWLSVPVVLNLLSSRQVMNTHFNSLHIVNTYGAFGSITKERAEVILQGTASSNASAPDAMWEDYEFKCKPGDPSRRPCLISPYHYRLDWLMWFAAFQTYEHNDWIIHLAGKLLASDAEALSLLAHNPFAGRPPPRWVRGEHYRYKFSRPGGRHAAEGKWWVRKRIGAYFPPLSLEELRPYFRDRGWPLPGPL

SEQ ID NO: 1543 - protein, 380 aa, Homo sapiens
MNPCGWLGAVGPTLPHFPKWAASLLEPRVLPWQAQVAHPVSGGPSPWISRPDTAQLDGTMAPAFLLLLLLWPQGCVSGPSADSVYTKVRLLEGETLSVQCSYKGYKNRVEGKVWCKIRKKKCEPGFARVWVKGPRYLLQDDAQAKVVNITMVALKLQDSGRYWCMRNTSGILYPLMGFQLDVSPAPQTERNIPFTHLDNILKSGTVTTGQAPTSGPDAPFTTGVMVFTPGLITLPRLLASTRPASKTGYSFTATSTTSQGPRRTMGSQTVTASPSNARDSSAGPESISTKSGDLSTRSPTTGLCLTSRSLLNRLPSMPSIRHQDVYSTVLGVVLTLLVLMLIMVYGFWKKRHMASYSMCSDPSTRDPPGRPEPYVEVYLI

SEQ ID NO: 1544 - protein, 255 aa, Homo sapiens
MTEYELLIQISDSVHYTEGALVVRVLDVNDNPPVFSQDFYQVTVPESIPVGYSVLTLSATDLESNENISYRILSSSKEFSIDPKNGTIFTISPVLLLDTISTTQFLVEASDGGNPDLRALTLVEIGIEDMNNYAPEFTVKSYNLSLSEDALVGSTLVTFSNIDHDWTRENTYVEYSIISGNSQNNFHVETKFFHSEYPYKQVGYLVLLHSLDREASASHELVILASDSGCPPLSSTAVISIQVLDVNDNPPNFSS

SEQ ID NO: 1545 - protein, 382 aa, Homo sapiens
MRSGGRGRPRLRLGERGLMEPLLPPKRRLLPRVRLLPLLLALAVGSAFYTIWSGWHRRTEELPLGRELRVPLIGSLPEARLRRVVGQLDPQRLWSTYLRPLLVVRTPGSPGNLQVRKFLEATLRSLTAGWHVELDPFTASTPLGPVDFGNVVATLDPRAARHLTLACHYDSKLFPPGSTPFVGATDSAVPCALLLELAQALDLELSRAKKQAAPVTLQLLFLDGEEALKEWGPKDSLYGSRHLAQLMESIPHSPGPTRIQAIELFMLLDLLGAPNPTFYSHFPRTVRWFHRLRSIEKRLHRLNLLQSHPQEVMYFQPGEPFGSVEDDHIPFLRRGVPVLHLISTPFPAVWHTPADTEVNLHPPTVHNLCRILAVFLAEYLGL

SEQ ID NO: 1546 - protein, 847 aa, Homo sapiens
MHLLGPWLLLLVLEYLAFSDSSKWVFEHPETLYAWEGACVWIPCTYRALDGDLESFILFHNPEYNKNTSKFDGTRLYESTKDGKVPSEQKRVQFLGDKNKNCTLSIHPVHLNDSGQLGLRMESKTEKWMERIHLNVSERPFPPHIQLPPEIQESQEVTLTCLLNFSCYGYPIQLQWLLEGVPMRQAAVTSTSLTIKSVFTRSELKFSPQWSHHGKIVTCQLQDADGKFLSNDTVQLNVKHTPKLEIKVTPSDAIVREGDSVTMTCEVSSSNPEYTTVSWLKDGTSLKKQNTFTLNLREVTKDQSGKYCCQVSNDVGPGRSEEVFLQVQYAPEPSTVQILHSPAVEGSQVEFLCMSLANPLPTNYTWYHNGKEMQGRTEEKVHIPKILPWHAGTYSCVAENILGTGQRGPGAELDVQYPPKKVTTVIQNPMPIREGDTVTLSCNYNSSNPSVTRYEWKPHGAWEEPSLGVLKIQNVGWDNTTIACAACNSWCSWASPVALNVQYAPRDVRVRKIKPLSEIHSGNSVSLQCDFSSSHPKEVQFFWEKNGRLLGKESQLNFDSISPEDAGSYSCWVNNSIGQTASKAWTLEVLYAPRRLRVSMSPGDQVMEGKSATLTCESDANPPVSHYTWFDWNNQSLPYHSQKLRLEPVKVQHSGAYWCQGTNSVGKGRSPLSTLTVYYSPETIGRRVAVGLGSCLAILILAICGLKLQRRWKRTQSQQGLQENSSGQSFFVRNKKVRRAPLSEGPHSLGCYNPMMEDGISYTTLRFPEMNIPRTGDAESSEMQRPPPDCDDTVTYSALHKRQVGDYENVIPDFPEDEGIHYSELIQFGVGERPQAQENVDYVILKH

SEQ ID NO: 1547 - protein, 199 aa, Homo sapiens
MTRLLGYVDPLDPSFVAAVITITFNPLYWNVVARWEHKTRKLSRAFGSPYLACYSLSVTILLLNFLRSHCFTQAMLSQPRMESLDTPAAYSLGLALLGLGVVLVLSSFFALGFAGTFLGDYFGILKEARVTVFPFNILDNPMYWGSTANYLGWAIMHASPTGLLLTVLVALTYIVALLYEEPFTAEIYRQKASGSHKRS

SEQ ID NO: 1548 - protein, 532 aa, Homo sapiens
MGKKVAIIGAGVSGLASIRSCLEEGLEPTCFEKSNDIGGLWKFSDHAEEGRASIYKSVFSNSSKEMMCFPDFPFPDDFPNFMHNSKIQEYIIAFAKEKNLLKYIQFKTFVSSVNKHPDFATTGQWDVTTERDGKKESAVFDAVMVCSGHHVYPNLPKESFPGLNHFKGKCFHSRDYKEPGVFNGKRVLVVGLGNSGCDIATELSRTAEQVLLPGSRSGSWVMSRVWDNGYPWDMLLVTRFGTFLKNNLPTAISDWLYMKQMNARFKHENYGLMPIKRVLRKEPVFNDELPASILCGIVSVKPNVKEFTETSAIFEDGTIFEGIDCVIFATGYSFAYPFLDESIIKSRNNEIILFKGVFPPLLEKSTIAVIGFVQSLGAAIPTVDLQSRWAAQVIKGTCTLPSMEDMMNDINEKMEKKRKWFGKSETIQTDYIVYMDELSSFIGAKPNIPWLFLTDPKLAMEVYFGPCSPYQFRLVGPGQWPGARNAILTQWDRSLKPMQTRVVGRLQKPCFFFHWLKLFAIPILLIAVFLVL

SEQ ID NO: 1549 - protein, 244 aa, Homo sapiens
MQPPGPPPAYAPTNGDFTFVSSADAEDLSGSIASPDVKLNLGGDFIKESTATTFLRQRGYGWLLEVEDDDPEDNKPLLEELDIDLKDIYYKIRCVLMPMPSLGFNRQVVRDNPDFWGPLAVVLFFSMISLYGQFRVVSWIITIWIFGSLTIFLLARVLGGEVAYGQVLGVIGYSLLPLIVIAPVLLVVGSFEVVSTLIKLFGVFWAAYSAASLLVGEEFKTKKPLLIYPIFLLYIYFLSLYTGV

SEQ ID NO: 1550 - protein, 106 aa, Homo sapiens
MATPGPVIPEVPFEPSKPPVIEGLSPTVYRNPESFKEKFVRKTRENPVVPIGCLATAAALTYGLYSFHRGNSQRSQLMMRTRIAAQGFTVAAILLGLAVTAMKSRP

SEQ ID NO: 1551 - protein, 270 aa, Homo sapiens
KMKIPFLLLFFLWEAESHAASRPNIILVMADDLGIGDPGCYGNKTIRTPNIDRLASGGVKLTQHLAASPLCTPSRAAFMTGRYPVRSGMASWSRTGVFLFTASSGGLPTDEITFAKLLKDQGYSTALIGKWHLGMSCHSKTDFCHHPLHHGFNYFYGISLTNLRDCKPGEGSVFTTGFKRLVFLPLQIVGVTLLTLAALNCLGLLHVPLGVFFSLLFLAALILTLFLGFLHYFRPLNCFMMRNYEIIQQPMSYDNLTQRLTVEAAQFIQR

SEQ ID NO: 1552 - protein, 361 aa, Homo sapiens
MARGDAPRDSYHLVGISFFILGLGTLLPWNFFITAIPYFQARLAGAGNSTARILSTNHTGPEDAFNFNNWVTLLSQLPLLLFTLLNSFLYQCVPETVRILGSLLAILLLFALTAALVKVDMSPGPFFSITMASVCFINSFSAVLQGSLFGQLGTMPSTYSTLFLSGQGLAGIFAALAMLLSMASGVDAETSALGYFITPCVGILMSIVCYLSLPHLKFARYYLANKSSQAQAQELETKAELLQSDLADSAVPCVGLHSHPVRLPRHHSHGDQLHQSWEVESVLQPHLLLPPLQHHGLAGTEPDLLLPVARRGQPAAAPAGLPAVPVRAPLHAVPRAPEVPAAHPLPTGCLLHHLHAALCRF

SEQ ID NO: 1553 - protein, 255 aa, Homo sapiens
MGPKTLPQLAGKWQVLCMLSLCCWGWVSGQLRYSVVEESEPGTLVGNVAQDLGLKMTDLLSRRLQLGSEENGRYFSLSLMSGALAVNQKIDRESLCGASTSCLLPVQVVTEHPLELIRVEVEILDLNDNSPSFATPEREMRISESAASGARFPLDSAQDPDVGTNTVSFYTLSPNSHFSLNVKTLKDGKPFPELVLEQQLDREAQARHQLVLTAVDGGTPARSGTTLISVIVLDINDNAPTFQSSVLRVGIPENA

SEQ ID NO: 1554 - protein, 85 aa, Homo sapiens
MEAGERIDASQLPHRVLETRGHAISILFGFWTSFICDTYIVLAWISKIKGSPDVSASSDEPYARIQQSRRQCHAEEDQSQVPEAG

SEQ ID NO: 1555 - protein, 402 aa, Homo sapiens
SSMSIRWPGRPLGSHAWILIAMFQLAVDLPACEALGPGPEFWLLPRSPPRPPRLWSFRSGQPARVPAPVWSPRPPRVERIHGQMQMPRARRAHRPRDQAAALVPKAGLAKPPAAAKSSPSLASSSSSSSSAVAGGAPEQQALLRRGKRHLQGDGLSSFDSRGSRPTTETEFIAWGPTGDEEALESNTFPGVYGPTTVSILQTRKTTVAATTTTTTTATPMTLQTKGFTESLDPRRRIPGGVSTTEPSTSPSNNGEVTQPPRILGEASGLAVHQIITITVSLIMVIAALITTLVLKNCCAQSGNTRRNSHQRKTNQQEESCQNLTDFPSARVPSSLDIFTAYNETLQCSHECVRASVPVYTDETLHSTTGEYKSTFNGNRPSSSDRHLIPVAFVSEKWFEISC

SEQ ID NO: 1556 - protein, 430 aa, Homo sapiens
GGLRVVSPFPLCQPAGEPSQGKMRSSCVLLTALVALAAYYVYIPLPGSVSDPWKLMLLDATFRGAQQVSNLIHYLGLSHHLLALNFIIVSFGKKSAWSSAQVKVTDTDFDGVEVRVFEGPPKPEEPLKRSVVYIHGGGWALASAKIRYYDELCTAMAEELNAVIVSIEYRLVPKVYFPEQIHDVVRATKYFLKPEVLQKYMVDPGRICISGDSAGGNLAAALGQQFTQDASLKNKLKLQALIYPVLQALDFNTPSYQQNVNTPILPRYVMVKYWVDYFKGNYDFVQAMIVNNHTSLDVEEAAAVRARLNWTSLLPASFTKNYKPVVQTTGNARIVQELPQLLDARSAPLIADQAVLQLLPKTYILTCEHDVLRDDGIMYAKRLESAGVEVTLDHFEDGFHGCMIFTSWPTNFSVGIRTRNSYIKWLDQNL

SEQ ID NO: 1557 - protein, 49 aa, Homo sapiens
MNVTSDKAYVATWLLMVEKKREVNYHNVGIFSIIFAFSFLSEVHFSKGM

SEQ ID NO: 1558 - protein, 111 aa, Homo sapiens
MQPFAFAMPCPVYFLRGLFLYFCRINFSNLELEGTIYVCVCIYIYKRKTYIYFNYLKCKNLPNTNGKSDVYYIILLFVHLCDLFTHFMFFIYKIVKLAKIILVFLIGREET

SEQ ID NO: 1559 - protein, 81 aa, Homo sapiens
MPAIFAKCCIQEILSECVSLLLFLGSYVRLFTLGICPELKSLSPFPQGETKIEFSYLSCLILFREKILHLLNFILGLKLFF

SEQ ID NO: 1560 - protein, 255 aa, Homo sapiens
MTAREHSPRHGARARAMQRASTIDVAADMLGLSLAGNIQDPDEPILEFSLACSELHTPSLDRKPNSFVAVSVTTPPQAFWTKHAQTEIIEGTNNPIFLSSIAFFQDSLINQMTQVKLSVYDVKDRSQGTMYLLGSGTFIVKDLLQDRHHRLHLTLRSAESDRVGNITVIGWQMEEKSDQRPPVTRSVDTVNGRMVLPVDESLTEALGIRSKYASLRKDTLLKSVFGGAICRMYRFPTTDGNHLRILEQMAESVLS

SEQ ID NO: 1561 - protein, 255 aa, Homo sapiens
MAVPSLWPWGACLPVIFLSLGFGLDTVEVCPSLDIRSEVAELRQLENCSVVEGHLQILLMFTATGEDFRGLSFPRLTQVTDYLLLFRVYGLESLRDLFPNLAVIRGTRLFLGYALVIFEMPHLRDVALPALGAVLRGAVRVEKNQELCHLSTIDWGLLQPAPGANHIVGNKLGEECADVCPGVLGAAGEPCAKTTFSGHTDYRCWTSSHCQRVCPCPHGMACTARGECCHTECLGGCSQPEDPRACVACRHLYFQ

SEQ ID NO: 1562 - protein, 187 aa, Homo sapiens
MTNKCLLQIALLLCFSTTALSMSYNLLGFLQRSSNFQCQKLLWQLNGRLEYCLKDRMNFDIPEEIKQLQQFQKEDAALTIYEMLQNIFAIFRQDSSSTGWNETIVENLLANVYHQINHLKTVLEEKLEKEDFTRGKLMSSLHLKRYYGRILHYLKAKEYSHCAWTIVRVEILRNFYFINRLTGYLRN

SEQ ID NO: 1563 - protein, 575 aa, Homo sapiens
MWSLLLCGLSIALPLSVTADGCKDIFMKNEILSASQPFAFNCTFPPITSGEVSVTWYKNSSKIPVSKIIQSRIHQDETWILFLPMEWGDSGVYQCVIKGRDSCHRIHVNLTVFEKHWCDTSIGGLPNLSDEYKQILHLGKDDSLTCHLHFPKSCVLGPIKWYKDCNEIKGERFTVLETRLLVSNVSAEDRGNYACQAILTHSGKQYEVLNGITVSITERAGYGGSVPKIIYPKNHSIEVQLGTTLIVDCNVTDTKDNTNLRCWRVNNTLVDDYYDESKRIREGVETHVSFREHNLYTVNITFLEVKMEDYGLPFMCHAGVSTAYIILQLPAPDFRAYLIGGLIALVAVAVSVVYIYNIFKIDIVLWYRSAFHSTETIVDGKLYDAYVLYPKPHKESQRHAVDALVLNILPEVLERQCGYKLFIFGRDEFPGQAVANVIDENVKLCRRLIVIVVPESLGFGLLKNLSEEQIAVYSALIQDGMKVILIELEKIEDYTVMPESIQYIKQKHGAIRWHGDFTEQSQCMKTKFWKTVRYHMPPRRCRPFPPVQLLQHTPCYRTAGPELGSRRKKCTLTTG

SEQ ID NO: 1564 - protein, 662 aa, Homo sapiens
MEPLVTWVVPLLFLFLLSRQGAACRTSECCFQDPPYPDADSGSASGPRDLRCYRISSDRYECSWQYEGPTAGVSHFLRCCLSSGRCCYFAAGSATRLQFSDQAGVSVLYTVTLWVESWARNQTEKSPEVTLQLYNSVKYEPPLGDIKVSKLAGQLRMEWETPDNQVGAEVQFRHRTPSSPWKLGDCGPQDDDTESCLCPLEMNVAQEFQLRRRQLGSQGSSWSKWSSPVCVPPENPPQPQVRFSVEQLGQDGRRRLTLKEQPTQLELPEGCQGLAPGTEVTYRLQLHMLSCPCKAKATRTLHLGKMPYLSGAAYNVAVISSNQFGPGLNQTWHIPADTHTEPVALNISVGTNGTTMYWPARAQSMTYCIEWQPVGQDGGLATCSLTAPQDPDPAGMATYSWSRESGAMGQEKCYYITIFASAHPEKLTLWSTVLSTYHFGGNASAAGTPHHVSVKNHSLDSVSVDWAPSLLSTCPGVLKEYVVRCRDEDSKQVSEHPVQPTETQVTLSGLRAGVAYTVQVRADTAWLRGVWSQPQRFSIEVQVSDWLIFFASLGSFLSILLVGVLGYLGLNRAARHLCPPLPTPCASSAIEFPGGKETWQWINPVDFQEEASLQEALVVEMSWDKGERTEPLEKTELPEGAPELALDTELSLEDGDRCKAKV

SEQ ID NO: 1565 - protein, 177 aa, Homo sapiens
MRERPRLGEDSSLISLFLQVVAFLAMVMGTHTYSHWPSCCPSKGQDTSEELLRWSTVPVPPLEPARPNRHPESCRASEDGPLNSRAISPWRYELDRDLNRLPQDLYHARCLCPHCVSLQTGSHMDPRGNSELLYHNQTVFYRRPCHGEKGTHKGYCLERRLYRVSLACVCVRPRVMG

SEQ ID NO: 1566 - protein, 420 aa, Homo sapiens
MIIVAHVLLILLGATEILQADLLPDEKISLLPPVNFTIKVTGLAQVLLQWKPNPDQEQRNVNLEYQVKINAPKEDDYETRITESKCVTILHKGFSASVRTILQNDHSLLASSWASAELHAPPGSPGTSIVNLTCTTNTTEDNYSRLRSYQVSLHCTWLVGTDAPEDTQYFLYYRYGSWTEECQEYSKDTLGRNIACWFPRTFILSKGRDWLAVLVNGSSKHSAIRPFDQLFALHAIDQINPPLNVTAEIEGTRLSIQWEKPVSAFPIHCFDYEVKIHNTRNGYLQIEKLMTNAFISIIDDLSKYDVQVRAAVSSMCREAGLWSEWSQPIYVGNDEHKPLREWFVIVIMATICFILLILSLICKICHLWIKLFPPIPAPKSNIKDLFVTTNYEKAGSSETEIEVICYIEKPGVETLEDSVF

SEQ ID NO: 1567 - protein, 255 aa, Homo sapiens
MRSPRTRGRSGRPLSLLLALLCALRAKVCGASGQFELEILSMQNVNGELQNGNCCGGARNPGDRKCTRDECDTYFKVCLKEYQSRVTAGGPCSFGSGSTPVIGGNTFNLKASRGNDRNRIVLPFSFAWPRSYTLLVEAWDSSNDTVQPDSIIEKASHSGMINPSRQWQTLKQNTGVAHFEYQIRVTCDDYYYGFGCNKFCRPRDDFFGHYACDQNGNKTCMEGWMGPECNRAICRQGCSPKHGSCKLPGDCRCQY

SEQ ID NO: 1568 - protein, 409 aa, Homo sapiens
MDRLKSHLTVCFLPSVPFLILVSTLATAKSVTNSTLNGTNVVLGSVPVIIARTDHIIVKEGNSALINCSVYGIPDPQFKWYNSIGKLLKEEEDEKERGGGKWQMHDSGLLNITKVSFSDRGKYTCVASNIYGTVNNTVTLRVIFTSGDMGVYYMVVCLVAFTIVMVLNITRLCMMSSHLKKTEKAINEFFRTEGAEKLQKAFEIAKRIPIITSAKTLELAKVTQFKTMEFARYIEELARSVPLPPLIMNCRTIMEEIMEVVGLEEQGQNFVRHTPEGQEAADRDEVYTIPNSLKRSDSPAADSDASSLHEQPQQIAIKVSVHPQSKKEHADDQEGGQFEVKDVEETELSAEHSPETAEPSTDVTSTELTSEEPTPVEVPDKVLPPAYLEATEPAVTHDKNTCIIYESHV

SEQ ID NO: 1569 - protein, 295 aa, Homo sapiens
PGLLFLLFSSLRADTQEKEVRAMVGSDVELSCACPEGSRFDLNDVYVYWQTSESKTVVTYHIPQNSSLENVDSRYRNRALMSPAGMLRGDFSLRLFNVTPQDEQKFHCLVLSQSLGFQEVLSVEVTLHVAANFSVPVVSAPHSPSQDELTFTCTSINGYPRPNVYWINKTDNSLLDQALQNDTVFLNMRGLYDVVSVLRIARTPSVNIGCCIENVLLQQNLTVGSQTGNDIGERDKITENPVSTGEKNAATWSILAVLCLLVVVAVAIGWVCRDRCLQHSYAGAWAVSPETELTG

SEQ ID NO: 1570 - protein, 255 aa, Homo sapiens
MPGPPALRRRLLLLLLVLLIAGSAGAAPLPQTGAGEAPPAAEVSSSFVILCVCSLIILIVLIANCVSCCKDPEIDFKEFEDNFDDEIDFTPPAEDTPSVQSPAEVFTLSVPNISLPAPSQFQPSVEGLKSQVARHSLNYIQEIGNGWFGKVLLGEIYTGTSVARVIVKELKASANPKEQDTFLKNGEPYYILQHPNILQCVGQCVEAIPYLLVFEFCDLGDLKAYLRSEQEHMRGDSQTMLLQRMACEVAAGLAA

SEQ ID NO: 1571 - protein, 160 aa, Homo sapiens
MSEVRPLSRDILMETLLYEQLLEPPTMEVLGMTDSEEDLDPMEDFDSLECMEGSDALALRLACIGDEMDVSLRAPRLAQLSEVAMHSLGLAFIYDQTEDIRDVLRSFMDGFTTLKENIMRFWRSPNPGSWVSCEQVLLALLLLLALLLPLLSGGLHLLLK

SEQ ID NO: 1572 - protein, 373 aa, Homo sapiens
MEQPVFLMTTAAQAISGFFVWTALLITCHQIYMHLRCYSCPNEQRYIVRILFIVPIYAFDSWLSLLFFTNDQYYVYFGTVRDCYEALVIYNFLSLCYEYLGGESSIMSEIRGKPIESSCMYGTCCLWGKTYSIGFLRFCKQATLQFCVVKPLMAVSTVVLQAFGKYRDGDFDVTSGYLYVTIIYNISVSLALYALFLFYFATRELLSPYSPVLKFFMVKSVIFLSFWQGMLLAILEKCGAIPKIHSARVSVGEGTVAAGYQDFIICVEMFFAALALRHAFTYKVYADKRLDAQGRCAPMKSISSSLKETMNPHDIVQDAIHNFSPAYQQYTQQSTLEPGPTWRGGAHGLSRSHSLSGARDNEKTLLLSSDDEF

SEQ ID NO: 1573 - protein, 385 aa, Homo sapiens
MLLMVVSMACVGLFLVQRAGPHMGGQDKPFLSAWPSAVVPRGGHVTLRCHYRHRFNNFMLYKEDRIHVPIFHGRIFQEGFNMSPVTTAHAGNYTCRGSHPHSPTGWSAPSNPMVIMVTGNHRKPSLLAHPGPLVKSGERVILQCWSDIMFEHFFLHKEWISKDPSRLVGQIHDGVSKANFSIGSMMRALAGTYRCYGSVTHTPYQLSAPSDPLDIVVTGLYEKPSLSAQPGPKVQAGESVTLSCSSRSSYDMYHLSREGGAHERRLPAVRKVNRTFQADFPLGPATHGGTYRCFGSFRHSPYEWSDPSDPLLVSVTGNPSSSWPSPTEPSSKSGNLRHLHILIGTSVVKIPFTILLFFLLHRWCSNKKKAVMDQEPAGNRSEQRG

SEQ ID NO: 1574 - protein, 212 aa, Homo sapiens
MSLMVVSMACVGFFLLQGAWPQEGVHRKPSFLALPGHLVKSEETVILQCWSDVMFEHFLLHREGKFNNTLHLIGEHHDGVSKANFSIGPMMPVLAGTYRCYGTYRCFGSFRDAPYEWSNSSDPLLVSVTGNPSNSWPSPTEPSSKTGNPRHLHVLIGTSVVKIPFTILLFFLLHRWCSDKKNAAVMDQEPAGNRTVNSEDSDEQDHQEVSYA

SEQ ID NO: 1575 - protein, 302 aa, Homo sapiens
MSLMVVSMACVGFFLLQGAWPHEGVHRKPSLLAHPGRLVKSEETVILQCWSDVRFEHFLLHREGKFKDTLHLIGEHHDGVSKANFSIGPMMQDLAGTYRCYGSVTHSPYQLSAPSDPLDIVITGLYEKPSLSAQPGPTVLAGESVTLSCSSRSSYDMYHLSREGEAHECRFSAGPKVNGTFQADFPLGPATHGGTYRCFGSFRDSPYEWSNSSDPLLVSVTGNPSNSWPSPTEPSSKTGNPRHLHILIGTSVVIILFILLFFLLHRWCSNKKNAAVMDQESAGNRTANSEDSDEQDPQEVTY

SEQ ID NO: 1576 - protein, 304 aa, Homo sapiens
MSLMVISMACVAFFLLQGAWPHEGFRRKPSLLAHPGPLVKSEETVILQCWSDVMFEHFLLHREGTFNHTLRLIGEHIDGVSKGNFSIGRMTQDLAGTYRCYGSVTHSPYQLSAPSDPLDIVITGLYEKPSLSAQPGPTVLAGESVTLSCSSRSSYDMYHLSREGEAHERRLPAGPKVNRTFQADFPLDPATHGGTYRCFGSFRDSPYEWSKSSDPLLVSVTGNSSNSWPSPTEPSSETGNPRHLHVLIGTSVVKLPFTILLFFLLHRWCSNKKNASVMDQGPAGNRTVNREDSDEQDHQEVSYA

SEQ ID NO: 1577 - protein, 243 aa, Homo sapiens
MGLVVEIWDWRGDMGLEWRYGLGVEIWAWGGDMGLEVELRAFSRDMGLGWRYGLGVEIWAWSGDMGLEVELLAFSRDMGLLSAPSDPLDIVITGLYEKPSLSAQPGPTVLAGESVTLSCSSRSSYDMYHLSREGEAHERRFSAGPKVNGTFQADFPLGPATHGGTYRCFGSFRDSPYEWSNSSDPLLVSVTGNPSNSWPSPTEPSSKTGNPRHLHVLIGTSVVIILFILLLFFLLHRWCSNKK

SEQ ID NO: 1578 - protein, 440 aa, Homo sapiens
MGPPGSPWQWVTLLLGLLLPPAAPFWLLNVLFPPHTTPKAELSNHTRPVILVPGCLGNQLEAKLDKPDVVNWMCYRKTEDFFTIWLDLNMFLPLGVDCWIDNTRVVYNRSSGLVSNAPGVQIRVPGFGKTYSVEYLDSSKLAGYLHTLVQNLVNNGYVRDETVRAAPYDWRLEPGQQEEYYRKLAGLVEEMHAAYGKPVFLIGHSLGCLHLLYFLLRQPQAWKDRFIDGFISLGAPWGGSIKPMLVLASGDNQGIPIMSSIKLKEEQRITTTSPWMFPSRMAWPEDHVFISTPSFNYTGRDFQRFFADLHFEEGWYMWLQSRDLLAGLPAPGVEVYCLYGVGLPTPRTYIYDHGFPYTDPVGVLYEDGDDTVATRSTELCGLWQGRQPQPVHLLPLHGIQHLNMVFSNLTLEHINAILLGAYRQGPPASPTASPEPPPPE

SEQ ID NO: 1579 - protein, 257 aa, Homo sapiens
MGTVRPPRPSLLLVSTRESCLFLLFCLHLGAACPQPCRCPDHAGAVAVFCSLRGLQEVPEDIPANTVLLKLDANKISHLPDGAFQHLHRLRELDLSHNAIEAIGSATFAGLAGGLRLLDLSYNRIQRIPKDALGKLSAKIRLSHNPLHCECALQEALWELKLDPDSVDEIACHTSVQEEFVGKPLVQALDAGASLCSVPHRTTDVAMLVTMFGWFAMVIAYVVYYVRHNQEDARRHLEYLKSLPSAPASKDPIGPGP

SEQ ID NO: 1580 - protein, 631 aa, Homo sapiens
MTPALTALLCLGLSLGPRTRVQAGPFPKPTLWAEPGSVISWGSPVTIWCQGSQEAQEYRLHKEGSPEPLDRNNPLEPKNKARFSIPSMTEHHAGRYRCHYYSSAGWSEPSDPLEMVMTGAYSKPTLSALPSPVVASGGNMTLRCGSQKGYHHFVLMKEGEHQLPRTLDSQQLHSRGFQALFPVGPVTPSHRWRFTCYYYYTNTPWVWSHPSDPLEILPSGVSRKPSLLTLQGPVLAPGQSLTLQCGSDVGYNRFVLYKEGERDFLQRPGQQPQAGLSQANFTLGPVSPSNGGQYRCYGAHNLSSEWSAPSDPLNILMAGQIYDTVSLSAQPGPTVASGENVTLLCQSWWQFDTFLLTKEGAAHPPLRLRSMYGAHKYQAEFPMSPVTSAHAGTYRCYGSRSSNPHLLSHPSEPLELVVSGHSGGSSLPPTGPPSTPGLGRYLEVLIGVSVAFVLLLFLLLFLLLRRQRHSKHRTSDQRKTDFQRPAGAAETEPKDRGLLRRSSPAADVQEENLYAAVKDTQSEDRVELDSQSPHDEDPQAVTYAPVKHSSPRREMASPPSSLSGEFLDTKDRQVEEDRQMDTEAAASEASQDVTYAQLHSLTLRRKATEPPPSQEGEPPAEPSIYATLAIH

SEQ ID NO: 1581 - protein, 598 aa, Homo sapiens
MTPIVTVLICLGLSLGPRTHVQTGTIPKPTLWAEPDSVITQGSPVTLSCQGSLEAQEYRLYREKKSASWITRIRPELVKNGQFHIPSITWEHTGRYGCQYYSRARWSELSDPLVLVMTGAYPKPTLSAQPSPVVTSGGRVTLQCESQVAFGGFILCKEGEEEHPQCLNSQPHARGSSRAIFSVGPVSPNRRWSHRCYGYDLNSPYVWSSPSDLLELLVPGVSKKPSLSVQPGPVVAPGESLTLQCVSDVGYDRFVLYKEGERDLRQLPGRQPQAGLSQANFTLGPVSRSYGGQYRCYGAHNLSSECSAPSDPLDILITGQIRGTPFISVQPGPTVASGENVTLLCQSWRQFHTFLLTKAGAADAPLRLRSIHEYPKYQAEFPMSPVTSAHAGTYRCYGSLNSDPYLLSHPSEPLELVVSGPSMGSSPPPTGPISTPAGPEDQPLTPTGSDPQSGLGRHLGVVIGILVAVVLLLLLLLLLFLILRHRRQGKHWTSTQRKADFQHPAGAVGPEPTDRGLQWRSSPAADAQEENLYAAVKDTQPEDGVEMDTRAAASEAPQDVTYAQLHSLTLRRKATEPPPSQEREPPAEPSIYATLAIH

SEQ ID NO: 1582 - protein, 304 aa, Homo sapiens
MSSTLPALLCVGLCLSQRISAQQQTLPKPFIWAEPHFMVPKEKQVTICCQGNYGAVEYQLHFEGSLFAVDRPKPPERINKVKFYIPDMNSRMAGQYSCIYRVGELWSEPSNLLDLVVTEMYDTPTLSVHPGPEVISGEKVTFYCRLDTATSMFLLLKEGRSSHVQRGYGKVQAEFPLGPVTTAHRGTYRCFGSYNNHAWSFPSEPVKLLVTGDIENTSLAPEDPTFPADTWGTYLLTTETGLQKDHALWDHTAQNLLRMGLAFLVLVALVWFLVEDWLSRKRTRERASRASTWEGRRRLNTQTL

SEQ ID NO: 1583 - protein, 276 aa, Homo sapiens
MAWRALHPLLLLLLLFPGSQAQSKAQVLQSVAGQTLTVRCQYPPTGSLYEKKGWCKEASALVCIRLVTSSKPRTMAWTSRFTIWDDPDAGFFTVTMTDLREEDSGHYWCRIYRPSDNSVSKSVRFYLVVSPASASTQTSWTPRDLVSSQTQTQSCVPPTAGARQAPESPSTIPVPSQPQNSTLRPGPAAPIALVPVFCGLLVAKSLVLSALLVWWGDIWWKTMMELRSLDTQKATCHLQQVTDLPWTSVSSPVEREILYHTVARTKISDDDDEHTL

SEQ ID NO: 1584 - protein, 415 aa, Homo sapiens
APGSARRPLLLLLLLLLLGLMHCASAAMFMVKNGNGTACIMANFSAAFSVNYDTKSGPKNMTFDLPSDATVVLNRSSCGKENTSDPSLVIAFGRGHTLTLNFTRNATRYSVQLMSFVYNLSDTHLFPNASSKEIKTVESITDIRADIDKKYRCVSGTQVHMNNVTVTLHDATIQAYLSNSSFSRGETRCEQDRPSPTTAPPAPPSPSPSPVPKSPSVDKYNVSGTNGTCLLASMGLQLNLTYERKDNTTVTRLLNINPNKTSASGSCGAHLVTLELHSEGTTVLLFQFGMNASSSRFFLQGIQLNTILPDARDPAFKAANGSLRALQATVGNSYKCNAEEHVRVTKAFSVNIFKVWVQAFKVEGGQFGSVEECLLDENSMLIPIAVGGALAGLVLIVLIAYLVGRKRSHAGYQTI

SEQ ID NO: 1585 - protein, 341 aa, Homo sapiens
MGELMAFLLPLIIVLMVKHSDSRTHSLRYFRLGVSDPIHGVPEFISVGYVDSHPITTYDSVTRQKEPRAPWMAENLAPDHWERYTQLLRGWQQMFKVELKRLQRHYNHSGSHTYQRMIGCELLEDGSTTGFLQYAYDGQDFLIFNKDTLSWLAVDNVAHTIKQAWEANQHELLYQKNWLEEECIAWLKRFLEYGKDTLQRTEPPLVRVNRKETFPGVTALFCKAHGFYPPEIYMTWMKNGEEIVQEIDYGDILPSGDGTYQAWASIELDPQSSNLYSCHVEHCGVHMVLQVPQESETIPLVMKAVSGSIVLVIVLAGVGVLVWRRRPREQNGAIYLPTPDR

SEQ ID NO: 1586 - protein, 250 aa, Homo sapiens
MALRAGLVLGFHTLMTLLSPQEAGATKADHMGSYGPAFYQSYGASGQFTHEFDEEQLFSVDLKKSEAVWRLPEFGDFARFDPQGGLAGIAAIKAHLDILVERSNRSRAINVPPRVTVLPKSRVELGQPNILICIVDNIFPPVINITWLRNGQTVTEGVAQTSFYSQPDHLFRKFHYLPFVPSAEDVYDCQVEHWGLDAPLLRHWELQVPIPPPDAMETLVCALGLAIGLVGFLVGTVLIIMGTYVSSVPR

SEQ ID NO: 1587 - protein, 641 aa, Homo sapiens
MTTPALLPLSGRRIPPLNLGPPSFPHHRATLRLSEKFILLLILSAFITLCFGAFFFLPDSSKHKRFDLGLEDVLIPHVDAGKGAKNPGVFLIHGPDEHRHREEEERLRNKIRADHEKALEEAKEKLRKSREEIRAEIQTEKNKVVQEMKIKENKPLPPVPIPNLVGIRGGDPEDNDIREKREKIKEMMKHAWDNYRTYGWGHNELRPIARKGHSPNIFGSSQMGATIVDALDTLYIMGLHDEFLDGQRWIEDNLDFSVNSEVSVFEVNIRFIGGLLAAYYLSGEEIFKIKAVQLAEKLLPAFNTPTGIPWAMVNLKSGVGRNWGWASAGSSILAEFGTLHMEFIHLSYLTGDLTYYKKVMHIRKLLQKMDRPNGLYPNYLNPRTGRWGQYHTSVGGLGDSFYEYLLKAWLMSDKTDHEARKMYDDAIEAIEKHLIKKSRGGLTFIGEWKNGHLEKKMGHLACFAGGMFALGADGSRADKAGHYLELGAEIARTCHESYDRTALKLGPESFKFDGAVEAVAVRQAEKYYILRPEVIETYWYLWRFTHDPRYRQWGWEAALAIEKYCRVNGGFSGVKDVYSSTPTHDDVQQSFFLAETLKYLYLLFSGDDLLPLDHWVFNTEAHPLPVLHLANTTLSGNPAVR

SEQ ID NO: 1588 - protein, 297 aa, Homo sapiens
MKHIINSYENINNTARNNSDCPRVVLPEEIFFTISIVGVLENLIVLLAVFKNKNLQAPMYFFICSLAISDMLGSLYKILENILIILRNMGYLKPRGSFETTADDIIDSLFVLSLLGSIFSLSVIAADRYITIFHALRYHSIVTMRRTVVVLTVIWTFCTGTGITMVIFSHHVPTVITFTSLFPLMLVFILCLYVHMFLLARSHTRKISTLPRANMKGAITLTILLGVFIFCWAPFVLHVLLMTFCPSNPYCACYMSLFQVNGMLIMCNAVIDPFIYAFRSPELRDAFKKMIFCSRYW

SEQ ID NO: 1589 - protein, 635 aa, Homo sapiens
MPSWALFMVTSCLLLAPQNLAQVSSQDVSLLASDSEPLKCFSRTFEDLTCFWDEEEAAPSGTYQLLYAYPREKPRACPLSSQSMPHFGTRYVCQFPDQEEVRLFFPLHLWVKNVFLNQTRTQRVLFVDSVGLPAPPSIIKAMGGSQPGELQISWEEPAPEISDFLRYELRYGPRDPKNSTGPTVIQLIATETCCPALQRPHSASALDQSPCAQPTMPWQDGPKQTSPSREASALTAEGGSCLISGLQPGNSYWLQLRSEPDGISLGGSWGSWSLPVTVDLPGDAVALGLQCFTLDLKNVTCQWQQQDHASSQGFFYHSRARCCPRDRYPIWENCEEEEKTNPGLQTPQFSRCHFKSRNDSIIHILVEVTTAPGTVHSYLGSPFWIHQAVRLPTPNLHWREISSGHLELEWQHPSSWAAQETCYQLRYTGEGHQDWKVLEPPLGARGGTLELRPRSRYRLQLRARLNGPTYQGPWSSWSDPTRVETATETAWISLVTALHLVLGLSAVLGLLLLRWQFPAHYRRLRHALWPSLPDLHRVLGQYLRDTAALSPPKATVSDTCEEVEPSLLEILPKSSERTPLPLCSSQAQMDYRRLQPSCLGTMPLSVCPPMAESGSCCTTHIANHSYLPLSYWQQP

SEQ ID NO: 1590 - protein, 568 aa, Homo sapiens
MMGCWILNEGLSTILVLSWLGINFYLFIDTFYWYEEEESFHYTRVILGSTLAWARASALCLNFNCMLILIPVSRNLISFIRGTSICCRGPWRRQLDKNLRFHKLVAYGIAVNATIHIVAHFFNLERYHWSQSEEAQGLLAALSKLGNTPNESYLNPVRTFPTNTTTELLRTIAGVTGLVISLALVLIMTSSTEFIRQASYELFWYTHHVFIVFFLSLAIHGTGRIVRGQTQDSLSLHNITFCRDRYAEWQTVAQCPVPQFSGKEPSAWKWILGPVVLYACERIIRFWRFQQEVVITKVVSHPSGVLELHMKKRGFKMAPGQYILVQCPAISSLEWHPFTLTSAPQEDFFSVHIRAAGDWTAALLEAFGAEGQALQEPWSLPRLAVDGPFGTALTDVFHYPVCVCVAAGIGVTPFAALLKSIWYKCSEAQTPLKLSKVYFYWICRDARAFEWFADLLLSLETRMSEQGKTHFLSYHIFLTGWDENQALHIALHWDENTDVITGLKQKTFYGRPNWNNEFKQIAYNHPSSSIGVFFCGPKALSRTLQKMCHLYSSADPRGVHFYYNKESF

SEQ ID NO: 1591 - protein, 390 aa, Homo sapiens
MPSKSLSNLSVTTGANESGSVPEGWERDFLPASDGTTTELVIRCVIPSLYLLIITVGLLGNIMLVKIFITNSAMRSVPNIFISNLAAGDLLLLLTCVPVDASRYFFDEWMFGKVGCKLIPVIQLTSVGVSVFTLTALSADRYRAIVNPMDMQTSGALLRTCVKAMGIWVVSVLLAVPEAVFSEVARISSLDNSSFTACIPYPQTDELHPKIHSVLIFLVYFLIPLAIISIYYYHIAKTLIKSAHNLPGEYNEHTKKQMETRKRLAKIVLVFVGCFIFCWFPNHILYMYRSFNYNEIDPSLGHMIVTLVARVLSFGNSCVNPFALYLLSESFRRHFNSQLCCGRKSYQERGTSYLLSSSAVRMTSLKSNAKNMVTNSVLLNGHSMKQEMAL

SEQ ID NO: 1592 - protein, 418 aa, Homo sapiens
MRLNSSAPGTPGTPAADPFQRAQAGLEEALLAPGFGNASGNASERVLAAPSSELDVNTDIYSKVLVTAVYLALFVVGTVGNTVTAFTLARKKSLQSLQSTVHYHLGSLALSDLLTLLLAMPVELYNFIWVHHPWAFGDAGCRGYYFLRDACTYATALNVASLSVERYLAICHPFKAKTLMSRSRTKKFISAIWLASALLAVPMLFTMGEQNRSADGQHAGGLVCTPTIHTATVKVVIQVNTFMSFIFPMVVISVLNTIIANKLTVMVRQAAEQGQVCTVGGEHSTFSMAIEPGRVQALRHGVRVLRAVVIAFVVCWLPYHVRRLMFCYISDEQWTPFLYDFYHYFYMVTNALFYVSSTINPILYNLVSANFRHIFLATLACLCPVWRRRRKRPAFSRKADSVSSNHTLSSNATRETLY

SEQ ID NO: 1593 - protein, 551 aa, Homo sapiens
MAQFVQVLAEIGDFGRFQIQLLILLCVLNFLSPFYFFAHVFMVLDEPHHCAVAWVKNHTFNLSAAEQLVLSVPLDTAGHPEPCLMFRPPPANASLQDILSHRFNETQPCDMGWEYPENRLPSLKNEFNLVCDRKHLKDTTQSVFMGGLLVGTLMFGPLCDRIGRKATILAQLLLFTLIGLATAFVPSFELYMALRFAVATAVAGLSFSNVTLLTEWVGPSWRTQAVVLAQCNFSLGQMVLAGLAYGFRNWRLLQITGTAPGLLLFFYFWALPESARWLLTRGRMDEAIQLIQKAASVNRRKLSPELMNQLVPEKTGPSGNALDLFRHPQLRKVTLIIFCVWFVDSLGYYGLSLQVGDFGLDVYLTQLIFGAVEVPARCSSIFMMQRFGRKWSQLGTLVLGGLMCIIIIFIPADLPVVVTMLAVVGKMATAAAFTISYVYSAELFPTILRQTGMGLVGIFSRIGGILTPLVILLGEYHAALPMLIYGSLPIVAGLLCTLLPETHGQGLKDTLQDLELGPHPRSPKSVPSEKETEAKGRTSSPGVAFVSSTYF

SEQ ID NO: 1594 - protein, 375 aa, Homo sapiens
MNTSHLLALLLPKSPQGENRSKPLGTPYNFSEHCQDSVDVMVFIVTSYSIETVVGVLGNLCLMCVTVRQKEKANVTNLLIANLAFSDFLMCLLCQPLTAVYTIMDYWIFGETLCKMSAFIQCMSVTVSILSLVLVALERHQLIINPTGWKPSISQAYLGIVLIWVIACVLSLPFLANSILENVFHKNHSKALEFLADKVVCTESWPLAHHRTIYTTFLLLFQYCLPLGFILVCYARIYRRLQRQGRVFHKGTYSLRAGHMKQVNVVLVVMVVAFAVLWLPLHVFNSLEDWHHEAIPICHGNLIFLVCHLLAMASTCVNPFIYGFLNTNFKKEIKALVLTCQQSAPLEESEHLPLSTVHTEVSKGSLRLSGRSNPI

SEQ ID NO: 1595 - protein, 255 aa, Homo sapiens
MTRSPPLRELPPSYTPPARTAAPQILAGSLKAPLWLRAYFQGLLFSLGCGIQRHCGKVLFLGLLAFGALALGLRMAIIETNLEQLWVEVGSRVSQELHYTKEKLGEEAAYTSQMLIQTARQEGENILTPEALGLHLQAALTASKVQVSLYGKSWDLNKICYKSGVPLIENGMIERMIEKLFPCVILTPLDCFWEGAKLQGGSAYLPGRPDIQWTNLDPEQLLEELGPFASLEGFRELLDKAQVGQAYVGRPCLHP

SEQ ID NO: 1596 - protein, 419 aa, Homo sapiens
MAGDSRNAMNQDMEIGVTPWDPKKIPKQARDYVPIATDRTRLLAEGKKPRQRYMEKSGKCNVHHGNVQETYRYLSDLFTTLVDLKWRFNLLVFTMVYTVTWLFFGFIWWLIAYIRGDLDHVGDQEWIPCVENLSGFVSAFLFSIETETTIGYGFRVITEKCPEGIILLLVQAILGSIVNAFMVGCMFVKISQPKKRAETLMFSNNAVISMRDEKLCLMFRVGDLRNSHIVEASIRAKLIKSRQTKEGEFIPLNQTDINVGFDTGDDRLFLVSPLIISHEINQKSPFWEMSQAQLHQEEFEVVVILEGMVEATGMTCQARSSYMDTEVLWGHRFTPVLTLEKGFYEVDYNTFHDTYETNTPSCCAKELAEMKREGRLLQYLPSPPLLGGCAEAGLDAEAEQNEEDEPKGLGGSREARGSV

SEQ ID NO: 1597 - protein, 511 aa, Homo sapiens
MDVCGWKEMEVALVNFDNSDEIQEEPGYATDFDSTSPKGRPGGSSFSNGKILISESTNHETAFSKLPGDYADPPGPEPVVLNEGNQRVIINIAGLRFETQLRTLSQFPETLLGDREKRMQFFDSMRNEYFFDRNRPSFDGILYYYQSGGKIRRPANVPIDIFADEISFYELGSEAMDQFREDEGFIKDPETLLPTNDIHRQFWLLFEYPESSSAARAVAVVSVLVVVISITIFCLETLPEFREDRELKVVRDPNLNMSKTVLSQTMFTDPFFMVESTCIVWFTFELVLRFVVCPSKTDFFRNIMNIIDIISIIPYFATLITELVQETEPSAQQNMSLAILRIIRLVRVFRIFKLSRHSKGLQILGQTLKASMRELGLLIFFLFIGVILFSSAVYFAEVDEPESHFSSIPDGFWWAVVTMTTVGYGDMCPTTPGGKIVGTLCAIAGVLTIALPVPVIVSNFNYFYHRETENEEKQNIPGEIERILNSVGSRMGSTDSLNKTNGGCSTEKSRK

SEQ ID NO: 1598 - protein, 513 aa, Homo sapiens
MTLLPGDNSDYDYSALSCTSDASFHPAFLPQRQAIKGAFYRRAQRLRPQDEPRQGCQPEDRRRRIIINVGGIKYSLPWTTLDEFPLTRLGQLKACTNFDDILNVCDDYDVTCNEFFFDRNPGAFGTILTFLRAGKLRLLREMCALSFQEELLYWGIAEDHLDGCCKRRYLQKIEEFAEMVEREEEDDALDSEGRDSEGPAEGEGRLGRCMRRLRDMVERPHSGLPGKVFACLSVLFVTVTAVNLSVSTLPSLREEEEQGHCSQMCHNVFIVESVCVGWFSLEFLLRLIQAPSKFAFLRSPLTLIDLVAILPYYITLLVDGAAAGRRKPGAGNSYLDKVGLVLRVLRALRILYVMRLARHSLGLQTLGLTARRCTREFGLLLLFLCVAIALFAPLLYVIENEMADSPEFTSIPACYWWAVITMTTVGYGDMVPRSTPGQVVALSSILSGILLMAFPVTSIFHTFSRSYLELKQEQERVMFRRAQFLIKTKSQLSVSQDSDILFGSASSDTRDNN

SEQ ID NO: 1599 - protein, 255 aa, Homo sapiens
MTMAGGRRGLVAPQNTFLENIVRRSNDTNFVLGNAQIVDWPIVYSNDGFCKLSGYHRAEVMQKSSTCSFMYGELTDKDTIEKVRQTFENYEMNSFEILMYKKNRTPVWFFVKIAPIRNEQDKVVLFLCTFSDITAFKQPIEDDSCKGWGKFARLTRALTSSRGVLQQLAPSVQKGENVHKHSRLAEVLQLGSDILPQYKQEAPKTPPHIILHYCVFKTTWDWIILILTFYTAILVPYNVSFKTRQNNVAWLVVDS

SEQ ID NO: 1600 - protein, 55 aa, Homo sapiens
MESPKCLYSRITVNTAFGTKFSHISFIILFKVFLFPRITISKKTKLVTLSNYLNK

SEQ ID NO: 1601 - protein, 615 aa, Homo sapiens
MPSRKFADGEVVRGRWPGSSLYYEVEILSHDSTSQLYTVKYKDGTELELKENDIKPLTSFRQRKGGSTSSSPSRRRGSRSRSRSRSPGRPPKSARRSASASHQADIKEARREVEVKLTPLILKPFGNSISRYNGEPEHIERNDAPHKNTQEKFSLSQESSYIATQYSLRPRREEVKLKEIDSKEEKYVAKELAVRTFEVTPIRAKDLEFGGVPGVFLIMFGLPVFLFLLLLMCKQKDPSLLNFPPPLPALYELWETRVFGVYLLWFLIQVLFYLLPIGKVVEGTPLIDGRRLKYRLNGFYAFILTSAVIGTSLFQGVEFHYVYSHFLQFALAATVFCVVLSVYLYMRSLKAPRNDLSPASSGNAVYDFFIGRELNPRIGTFDLKYFCELRPGLIGWVVINLVMLLAEMKIQDRAVPSLAMILVNSFQLLYVVDALWNEEALLTTMDIIHDGFGFMLAFGDLVWVPFIYSFQAFYLVSHPNEVSWPMASLIIVLKLCGYVIFRGANSQKNAFRKNPSDPKLAHLKTIHTSTGKNLLVSGWWGFVRHPNYLGDLIMALAWSLPCGFNHILPYFYIIYFTMLLVHREARDEYHCKKKYGVAWEKYCQRVPYRIFPYIY

SEQ ID NO: 1602 - protein, 271 aa, Homo sapiens
IISIIIILAGAIALIIGFGISGRHSITVTTVASAGNIGEDGILSCTFEPDIKLSDIVIQWLKEGVLGLVHEFKEGKDELSEQDEMFRGRTAVFADQVIVGNASLRLKNVQLTDAGTYKCYIITSKGKGNANLEYKTGAFSMPEVNVDYNASSETLRCEAPRWFPQPTVVWASQVDQGANFSEVSNTSFELNSENVTMKVVSVLYNVTINNTYSCMIENDIAKATGDIKVTESEIKRRSHLQLLNSKASLCVSSFFAISWALLPLSPYLMLK

SEQ ID NO: 1603 - protein, 359 aa, Homo sapiens
MKSPFYRCQNTTSVEKGNSAVMGGVLFSTGLLGNLLALGLLARSGLGWCSRRPLRPLPSVFYMLVCGLTVTDLLGKCLLSPVVLAAYAQNRSLRVLAPALDNSLCQAFAFFMSFFGLSSTLQLLAMALECWLSLGHPFFYRRHITLRLGALVAPVVSAFSLAFCALPFMGFGKFVQYCPGTWCFIQMVHEEGSLSVLGYSVLYSSLMALLVLATVLCNLGAMRNLYAMHRRLQRHPRSCTRDCAEPRADGREASPQPLEELDHLLLLALMTVLFTMCSLPVIYRAYYGAFKDVKEKNRTSEEAEDLRALRFLSVISIVDPWIFIIFRSPVFRIFFHKIFIRPLRYRSRCSNSTNMESSL

SEQ ID NO: 1604 - protein, 402 aa, Homo sapiens
MSPCGPLNLSLAGEATTCAAPWVPNTSAVPPSGASPALPIFSMTLGAVSNLLALALLAQAAGRLRRRRSAATFLLFVASLLATDLAGHVIPGALVLRLYTAGRAPAGGACHFLGGCMVFFGLCPLLLGCGMAVERCVGVTRPLLHAARVSVARARLALAAVAAVALAVALLPLARVGRYELQYPGTWCFIGLGPPGGWRQALLAGLFASLGLVALLAALVCNTLSGLALLRARWRRRSRRPPPASGPDSRRRWGAHGPRSASASSASSIASASTFFGGSRSSGSARRARAHDVEMVGQLVGIMVVSCICWSPMLVLVALAVGGWSSTSLQRPLFLAVRLASWNQILDPWVYILLRQAVLRQLLRLLPPRAGAKGGPAGLGLTPSAWEASSLRSSRHSGLSHF

SEQ ID NO: 1605 - protein, 454 aa, Homo sapiens
MKETRGYGGDAPFCTRLNHSYTGMWAPERSAEARGNLTRPPGSGEDCGSVSVAFPITMLLTGFVGNALAMLLVSRSYRRRESKRKKSFLLCIGWLALTDLVGQLLTTPVVIVVYLSKQRWEHIDPSGRLCTFFGLTMTVFGLSSLFIASAMAVERALAIRAPHWYASHMKTRATRAVLLGVWLAVLAFALLPVLGVGQYTVQWPGTWCFISTGRGGNGTSSSHNWGNLFFASAFAFLGLLALTVTFSCNLATIKALVSRCRAKATASQSSAQWGRITTETAIQLMGIMCVLSVCWSPLLIMMLKMIFNQTSVEHCKTHTEKQKECNFFLIAVRLASLNQILDPWVYLLLRKILLRKFCQVANAVSSCSNDGQKGQPISLSNEIIQTEAMRKRRLREQAPLLPTSTVIDPSRFCAQPFRWFLDLSFPAMSSSHPQLPLTLASFKLLREPCSVQLS

SEQ ID NO: 1606 - protein, 432 aa, Homo sapiens
MEMEKEFEQIDKSGSWAAIYQDIRHEASDFPCRVAKLPKNKNRNRYRDVSPFDHSRIKLHQEDNDYINASLIKMEEAQRSYILTQGPLPNTCGHFWEMVWEQKSRGVVMLNRVMEKGSLKCAQYWPQKEEKEMIFEDTNLKLTLISEDIKSYYTVRQLELENLTTQETREILHFHYTTWPDFGVPESPASFLNFLFKVRESGSLSPEHGPVVVHCSAGIGRSGTFCLADTCLLLMDKRKDPSSVDIKKVLLEMRKFRMGLIQTADQLRFSYLAVIEGAKFIMGDSSVQDQWKELSHEDLEPPPEHIPPPPRPPKRILEPHNGKCREFFPNHQWVKEETQEDKDCPIKEEKGSPLNAAPYGIESMSQDTEVRSRVVGGSLRGAQAASPAKGEPSLPEKDEDHALSYWKPFLVNMCVATVLTAGAYLCYRVCFH

SEQ ID NO: 1607 - protein, 255 aa, Homo sapiens
LFLFQILCAGGTPSPIPDPSVATVATGENGITQISSTAESFHKQNGTGTPQVETNTSEDGESSGANDSLRTPEQGSNGTDGASQKTPSSTGPSPVFDIKAVSISPTNVILTWKSNDTAASEYKYVVKHKMENEKTITVVHQPWCNITGLRPATSYVFSITPGIGNETWGDPRVIKVITEPIPVSDLRVALTGVRKAALSWSNGNGTASCRVLLESIGSHEELTQDSRLQVNISGLKPGVQYNINPYLLQSNKTKG

SEQ ID NO: 1608 - protein, 255 aa, Homo sapiens
MAPTWGPGMVSVVGPMGLLVVLLVGGCAAEEPPRFIKEPKDQIGVSGGVASFVCQATGDPKPRVTWNKKGKKVNSQRFETIEFDESAGAVLRIQPLRTPRDENVYECVAQNSVGEITVHAKLTVLREDQLPSGFPNIDMGPQLKVVERTRTATMLCAASGNPDPEITWFKDFLPVDPSASNGRIKQLRSDQAFSHLPTGALQIESSEETDQGKYECVATNSAGVRYSSPANLYVRELREVRRVAPRFSILPMSHE

SEQ ID NO: 1609 - protein, 279 aa, Homo sapiens
GSLYVWKSELPRDHPAVIKRRFTSVLVVSSLSPLCVLLWRELTGIQPGTSLLTLMGFRLEGIFPAALLPLLLTMILFLGPLMQLSMDCPCDLADGLKVVLAPRSWARCLTDMRWLRNQVIAPLTEELVFRACMLPMLAPCMGLGPAVFTCPLFFGVAHFHHIIEQLRFRQSSVGNIFLSAAFQFSYTAVFGAYTAFLFIRTGHLIGPVLCHSFCNYMGFPAVCAALEHPQRRPLLAGYALGVGLFLLLLQPLTDPKLYGSLPLCVLLERAGDSEAPLCS

SEQ ID NO: 1610 - protein, 255 aa, Homo sapiens
MATVRASLRGALLLLLAVAGVAEVAGGLAPGSAGALCCNHSKDNQMCRDVCEQIFSSKSESRLKHLLQRAPDYCPETMVEIWNCMNSSLPGVFKKSDGWVGLGCCELAIALECRQACKQASSKNDISKVCRKEYENALFSCISRNEMGSVCCSYAGHHTNCREYCQAIFRTDSSPGPSQIKAVENYCASISPQLIHCVNNYTQSYPMRNPTDSLYCCDRAEDHACQNACKRILMSKKTEMEIVDGLIEGCKTQPL

SEQ ID NO: 1611 - protein, 389 aa, Homo sapiens
MAPSHRASQVGFCPTPERPLWRLPPTCRPRRMSVCYRPPGNETLLSWKTSRATGTAFLLLAALLGLPGNGFVVWSLAGWRPARGRPLAATLVLHLALADGAVLLLTPLFVAFLTRQAWPLGQAGCKAVYYVCALSMYASVLLTGLLSLQRCLAVTRPFLAPRLRSPALARRLLLAVWLAALLLAVPAAVYRHLWRDRVCQLCHPSPVHAAAHLSLETLTAFVLPFGLMLGCYSVTLARLRGARWGSGRHGARVGRLVSAIVLAFGLLWAPYHAVNLLQAVAALAPPEGALAKLGGAGQAARAGTTALAFFSSSVNPVLYVFTAGDLLPRAGPRFLTRLFEGSGEARGGGRSREGTMELRTTPQLKVVGQGRGNGDPGGGMEKDGPEWDL

SEQ ID NO: 1612 - protein, 400 aa, Homo sapiens
MATLLLLLGVLVVSPDALGSTTAVQTPTSGEPLVSTSEPLSSKMYTTSITSDPKADSTGDQTSALPPSTSINEGSPLWTSIGASTGSPLPEPTTYQEVSIKMSSVPQETPHATSHPAVPITANSLGSHTVTGGTITTNSPETSSRTSGAPVTTAASSLETSRGTSGPPLTMATVSLETSKGTSGPPVTMATDSLETSTGTTGPPVTMTTGSLEPSSGASGPQVSSVKLSTMMSPTTSTNASTVPFRNPDENSRGMLPVAVLVALLAVIVLVALLLLWRRRQKRRTGALVLSRGGKRNGVVDAWAGPAQVPEEGAVTVTVGGSGGDKGSGFPDGEGSSRRPTLTTFFGRRKSRQGSLAMEELKSGSGPSLKGEEEPLVASEDGAVDAPAPDEPEGGDGAAP

SEQ ID NO: 1613 - protein, 760 aa, Homo sapiens
ELGLQKRGCCLVLGYMAKDKFRRMNEGQVYSFSQQPQDQVVVSGQPVTLLCAIPEYDGFVLWIKDGLALGVGRDLSSYPQYLVVGNHLSGEHHLKILRAELQDDAVYECQAIQAAIRSRPARLTVLVPPDDPVILGGPVISLRAGDPLNLTCHADNAKPAASIIWLRKGEVINGATYSKTLLRDGKRESIVSTLFISPGDVENGQSIVCRATNKAIPGGKETSVTIDIQHPPLVNLSVEPQPVLEDNVVTFHCSAKANPAVTQYRWAKRGQIIKEASGEVYRTTVDYTYFSEPVSCEVTNALGSTNLSRTVDVYFGPRMTTEPQSLLVDLGSDAIFSCAWTGNPSLTIVWMKRGSGVVLSNEKTLTLKSVRQEDAGKYVCRAVVPRVGAGEREVTLTVNGPPIISSTQTQHALHGEKGQIKCFIRSTPPPDRIAWSWKENVLESGTSGRYTVETISTEEGVISTLTISNIVRADFQTIYNCTAWNSFGSDTEIIRLKEQGSEMKSGAGLEAESVPMAVIIGVAVGAGVAFLVLMATIVAFCCARSQRNLKGVVSAKNDIRVEIVHKEPASGREGEEHSTIKQLMMDRGEFQQDSVLKQLEVLKEEEKEFQNLKDPTNGYYSVNTFKEHHSTPTISLSSCQPDLRPAGKQRVPTGMSFTNIYSTLSGQGRLYDYGQRFVLGMGSSSIELCEREFQRGSLSDSSSFLDTQCDSSVSSSGKQDGYVQFDKASKASASSSHHSQSSSQNSDPSRPLQRRMQTHV

SEQ ID NO: 1614 - protein, 638 aa, Homo sapiens
MAEHRSMDGRMEAATRGGSHLQAAAQTPPRPGPPSAPPPPPKEGHQEGLVELPASFRELLTFFCTNATIHGAIRLVCSRGNRLKTTSWGLLSLGALVALCWQLGLLFERHWHRPVLMAVSVHSERKLLPLVTLCDGNPRRPSPVLRHLELLDEFARENIDSLYNVNLSKGRAALSATVPRHEPPFHLDREIRLQRLSHSGSRVRVGFRLCNSTGGDCFYRGYTSGVAAVQDWYHFHYVDILALLPAAWEDSHGSQDGHFVLSCSYDGLDCQARQFRTFHHPTYGSCYTVDGVWTAQRPGITHGVGLVLRVEQQPHLPLLSTLAGIRVMVHGRNHTPFLGHHSFSVRPGTEATISIREDEVHRLGSPYGHCTAGGEGVEVELLHNTSYTRQACLVSCFQQLMVETCSCGYYLHPLPAGAEYCSSARHPAWGHCFYRLYQDLETHRLPCTSRCPRPCRESAFKLSTGTSRWPSAKSAGWTLATLGEQGLPHQSHRQRSSLAKINIVYQELNYRSVEEAPVYSVPQLLSAMGSLCSLWFGASVLSLLELLELLLDASALTLVLGGRRLRRAWFSWPRASPASGASSIKPEASQMPPPAGGTSDDPEPSRPHLPRVMLPGVLAGVSAEESWAGPQPLETLDT

SEQ ID NO: 1615 - protein, 288 aa, Homo sapiens
MKLLRRAWRRRAALGLGTLALCGAALLYLARCAAEPGDPRAMSGRSPPPPAPARAAAFLAVLVASAPRAAERRSVIRSTWLARRGAPGDVWARFAVGTAGLGAEERRALEREQARHGDLLLLPALRDAYENLTAKVLAMLAWLDEHVAFEFVLKADDDSFARDALLAELRAREPARRRRLYWGFFSGRAARDYLRAWHSEDVSLGAWLAPVDVQREHDPRFDTEYRSRGCSNQYLVTHKQSLEDMLEKHATLAREGRLCKREVQLRLSYVYDWSAPPSQCCQRREGIP

SEQ ID NO: 1616 - protein, 255 aa, Homo sapiens
MGKLIRMGPQERWLLRTKRLHWSRLLFLLGMLIIGSTYQHLRRPRGLSSLWAAVSSHQPIKLASRDLSSEEMMMMSSSPSKPSSEMGGKMLVPQASVGSDEATLSMTVENIPSMPKRTAKMIPTTTKNNYSPTAAGTERRKEDTPTSSRTLTYYTSTSSRQIVKKYTPTPRGEMKSYSPTQVREKVKYTPSPRGRRVGTYVPSTFMTMETSHAITPRTTVKDSDITATYKILETNSLKRIMEETTPTTLKGMFDS

SEQ ID NO: 1617 - protein, 701 aa, Homo sapiens
MDESPEPLQQGRGPVPVRRQRPAPRGLREMLKARLWCSCSCSVLCVRALVQDLLPATRWLRQYRPREYLAGDVMSGLVIGIILVPQAIAYSLLAGLQPIYSLYTSFFANLIYFLMGTSRHVSVGIFSLLCLMVGQVVDRELQLAGFDPSQDGLQPGANSSTLNGSAAMLDCGRDCYAIRVATALTLMTGLYQVLMGVLRLGFVSAYLSQPLLDGFAMGASVTILTSQLKHLLGVRIPRHQGPGMVVLTWLSLLRGAGQANVCDVVTSTVCLAVLLAAKELSDRYRHRLRVPLPTELLVIVVATLVSHFGQLHKRFGSSVAGDIPTGFMPPQVPEPRLMQRVALDAVALALVAAAFSISLAEMFARSHGYSVRANQELLAVGCCNVLPAFLHCFATSAALAKSLVKTATGCRTQLSSVVSATVVLLVLLALAPLFHDLQRSVLACVIVVSLRGALRKVWDLPRLWRMSPADALVWAGTAATCMLVSTEAGLLAGVILSLLSLAGRTQRPRTALLARIGDTAFYEDATEFEGLVPEPGVRVFRFGGPLYYANKDFFLQSLYSLTGLDAGCMAARRKEGGSETGVGEGGPAQGEDLGPVSTRAALVPAAAGFHTVVIDCAPLLFLDAAGVSTLQDLRRDYGALGISLLLACCSPPVRDILSRGGFLGEGPGDTAEEEQLFLSVHDAVQTARARHRELEATDAHL

SEQ ID NO: 1618 - protein, 659 aa, Homo sapiens
MASTVSPSTIAETPEPPPLSDHIRNAADISVIVIYFLVVMAVGLWAMLKTNRGTIGGFFLAGRDMAWWPMGASLFASNIGSNHYVGLAGTGAASGVATVTFEWTSSVMLLILGWIFVPIYIKSGVMTMPEYLKKRFGGERLQVYLSILSLFICVVLLISADIFAGAIFIKLALGLDLYLAIFILLAMTAVYTTTGGLASVIYTDTLQTIIMLIGSFILMGFAFNEVGGYESFTEKYVNATPSVVEGDNLTISASCYTPRADSFHIFRDAVTGDIPWPGIIFGMPITALWYWCTNQVIVQRCLCGKDMSHVKAACIMCAYLKLLPMFLMVMPGMISRILYTDMVACVVPSECVKHCGVDVGCTNYAYPTMVLELMPQGLRGLMLSVMLASLMSSLTSIFNSASTLFTIDLYTKMRKQASEKELLIAGRIFVLLLTVVSIVWVPLVQVSQNGQLIHYTESISSYLGPPIAAVFVLAIFCKRVNEQGAFWGLMVGLAMGLIRMITEFAYGTGSCLAPSNCPKIICGVHYLYFSIVLFFGSMLVTLGISLLTKPIPDVHLYRLCWVLRNSTEERIDIDAEEKSQEETDDGVEEDYPEKSRGCLKKAYDLFCGLQKGPKLTKEEEEALSKKLTDTSERPSWRTIVNINAILLLAVVVFIHGYYA

SEQ ID NO: 1619 - protein, 704 aa, Homo sapiens
SLGTILLYAVVGTVWNAATTGLSLYGVFLSGLMGDLQIGLLDFLLFGSLMAAVDPVAVLAVFEEVHVNEVLFIIVFGESLLNDAVTVVLYNVFESFVALGGDNVTGVDCVKGIVSFFVVSLGGTLVGVVFAFLLSLVTRFTKHVRIIEPGFVFIISYLSYLTSEMLSLSAILAITFCGICCQKYVKANISEQSATTVRYTMKMLASSAETIIFMFLGISAVNPFIWTWNTAFVLLTLVFISVYRAIGVVLQTWLLNRYRMVQLEPIDQVVLSYGGLRGAVAFALVVLLDGDKVKEKNLFVSTTIIVVFFTVIFQGHETLSSRGLTIKPLVQWLKVKRSEHREPRLNEKLHGRAFDHILSAIEDISGQIGHNYLRDKWSHFDRKFLSRVLMRRSAQKSRDRILNVFHELNLKDAISYVAEGERRGSLAFIRSPSTDNVVNVDFTPRSSTVEASVSYLLRENVSAVCLDMQSLEQRRRSIRDAEDMVTHHTLQQYLYKPRQEYKHLYSRHELTPTEDEKQDREIFHRTMRKRLESFKSTKLGLNQNKKAAKLYKRERAQKRRNSSIPNGKLPMESPAQNFTIKEKDLELSDTEEPPNYDEEMSGGIEFLASVTKDTASDSPAGIDNPVFSPDEALDRSLLARLPPWLSPGETVVPSQRARTQIPYSPGTFCRLMPFRLSSKSVDSFLQADGPEERPPAALPESTHM

SEQ ID NO: 1620 - protein, 642 aa, Homo sapiens
LELFRWQWHEVEAPYLVALWILVASLAKIVFHLSRKVTSLVPESCLLILLGLVLGGIVLAVAKKAEYQLEPGTFFLFLLPPIVLDSGYFMPSRLFFDNLGAILTYAVVGTLWNAFTTGAALWGLQQAGLVAPRVQAGLLDFLLFGSLISAVDPVAVLAVFEEVHVNETLFIIVFGESLLNDAVTVVLYKVCNSFVEMGSANVQATDYLKGVASLFVVSLGGAAVGLVFAFLLALTTRFTKRVRIIEPLLVFLLAYAAYLTAEMASLSAILAVTMCGLGCKKYVEANISHKSRTTVKYTMKTLASCAETVIFMLLGISAVDSSKWAWDSGLVLGTLIFILFFRALGVVLQTWVLNQFRLVPLDKIDQVVMSYGGLRGAVAFALVILLDRTKVPAKDYFVATTIVVVFFTVIVQGLTIKPLVKWLKVKRSEHHKPTLNQELHEHTFDHILAAVEDVVGHHGYHYWRDRWEQFDKKYLSQLLMRRSAYRIRDQIWDVYYRLNIRDAISFVDQSLLGEICQHLFICPSPGLPPAPSPAHVSPASCRRESGSGACLDLQVIDTVRSGRDREDAVMHHLLCGGLYKPRRRYKASCSRHFISEDAQERQDKEVFQQNMKRRLESFKSTKHNICFTKSKPRPRKTGRRKA

SEQ ID NO: 1621 - protein, 418 aa, Homo sapiens
MDMLHPSSVSTTSEPENASSAWPPDATLGNVSAGPSPAGLAVSGVLIPLVYLVVCVVGLLGNSLVIYVVLRHTASPSVTNVYILNLALADELFMLGLPFLAAQNALSYWPFGSLMCRLVMAVDGINQFTSIFCLTVMSVDRYLAVVHPTRSARWRTAPVARTVSAAVWVASAVVVLPVVVFSGVPRGMSTCHMQWPEPAAAWRAGFIIYTAALGFFGPLLVICLCYLLIVVKVRSAGRRVWAPSCQRRRRSERRVTRMVVAVVALFVLCWMPFYVLNIVNVVCPLPEEPAFFGLYFLVVALPYANSCANPILYGFLSYRFKQGFRRVLLRPSRRVRSQEPTVGPPEKTEEEDEEEEDGEESREGGKGKEMNGRVSQITQPGTSGQERPPSRVASKEQQLLPQEASTGEKSSTMRISYL

SEQ ID NO: 1622 - protein, 388 aa, Homo sapiens
MSAPSTLPPGGEEGLGTAWPSAANASSAPAEAEEAVAGPGDARAAGMVAIQCIYALVCLVGLVGNALVIFVILRYAKMKTATNIYLLNLAVADELFMLSVPFVASSAALRHWPFGSVLCRAVLSVDGLNMFTSVFCLTVLSVDRYVAVVHPLRAATYRRPSVAKLINLGVWLASLLVTLPIAIFADTRPARGGQAVACNLQWPHPAWSAVFVVYTFLLGFLLPVLAIGLCYLLIVGKMRAVALRAGWQQRRRSEKKITRLVLMVVVVFVLCWMPFYVVQLLNLFVTSLDATVNHVSLILSYANSCANPILYGFLSDNFRRFFQRVLCLRCCLLEGAGGAEEEPLDYYATALKSKGGAGCMCPPLPCQQEALQPEPGRKRIPLTRTTTF

SEQ ID NO: 1623 - protein, 364 aa, Homo sapiens
MEPLFPASTPSWNASSPGAASGGGDNRTLVGPAPSAGARAVLVPVLYLLVCAAGLGGNTLVIYVVLRFAKMKTVTNIYILNLAVADVLYMLGLPFLATQNAASFWPFGPVLCRLVMTLDGVNQFTSVFCLTVMSVDRYLAVVHPLSSARWRRPRVAKLASAAAWVLSLCMSLPLLVFADVQEGGTCNASWPEPVGLWGAVFIIYTAVLGFFAPLLVICLCYLLIVVKVRAAGVRVGCVRRRSERKVTRMVLVVVLVFAGCWLPFFTVNIVNLAVALPQEPASAGLYFFVVILSYANSCANPVLYGFLSDNFRQSFQKVLCLRKGSGAKDADATELRPDRIRQQQEATPPAHRAAANGLMQTSKL

SEQ ID NO: 1624 - protein, 462 aa, Homo sapiens
MLLLARCLLLVLVSSLLVCSGLACGPGRGFGKRRHPKKLTPLAYKQFIPNVAEKTLGASGRYEGKISRNSERFKELTPNYNPDIIFKDEENTGADRLMTQRCKDKLNALAISVMNQWPGVKLRVTEGWDEDGHHSEESLHYEGRAVDITTSDRDRSKYGMLARLAVEAGFDWVYYESKAHIHCSVKAENSVAAKSGGCFPGSATVHLEQGGTKLVKDLSPGDRVLAADDQGRLLYSDFLTFLDRDDGAKKVFYVIETREPRERLLLTAAHLLFVAPHNDSATGEPEASSGSGPPSGGALGPRALFASRVRPGQRVYVVAERDGDRRLLPAAVHSVTLSEEAAGAYAPLTAQGTILINRVLASCYAVIEEHSWAHRAFAPFRLAHALLAALAPARTDRGGDSGGGDRGGGGGRVALTAPGAADAPGAGATAGIHWYSQLLYQIGTWLLDSEALHPLGMAVKSS

SEQ ID NO: 1625 - protein, 423 aa, Homo sapiens
MKPNFSLRLRIFNLNCWGIPYLSKHRADRMRRLGDFLNQESFDLALLEEVWSEQDFQYLRQKLSPTYPAAHHFRSGIIGSGLCVFSKHPIQELTQHIYTLNGYPYMIHHGDWFSGKAVGLLVLHLSGMVLNAYVTHLHAEYNRQKDIYLAHRVAQAWELAQFIHHTSKKADVVLLCGDLNMHPEDLGCCLLKEWTGLHDAYLETRDFKGSEEGNTMVPKNCYVSQQELKPFPFGVRIDYVLYKAVSGFYISCKSFETTTGFDPHRGTPLSDHEALMATLFVRHSPPQQNPSSTHGPAERSPLMCVLKEAWTELGLGMAQARWWATFASYVIGLGLLLLALLCVLAAGGGAGEAAILLWTPSVGLVLWAGAFYLFHVQEVNGLYRAQAELQHVLGRAREAQDLGPEPQPALLLGQQEGDRTKEQ

SEQ ID NO: 1626 - protein, 407 aa, Homo sapiens
MDNVLPVDSDLSPNISTNTSEPNQFVQPAWQIVLWAAAYTVIVVTSVVGNVVVMWIILAHKRMRTVTNYFLVNLAFAEASMAAFNTVVNFTYAVHNEWYYGLFYCKFHNFFPIAAVFASIYSMTAVAFDRYMAIIHPLQPRLSATATKVVICVIWVLALLLAFPQGYYSTTETMPSRVVCMIEWPEHPNKIYEKVYHICVTVLIYFLPLLVIGYAYTVVGITLWASEIPGDSSDRYHEQVSAKRKVVKMMIVVVCTFAICWLPFHIFFLLPYINPDLYLKKFIQQVYLAIMWLAMSSTMYNPIIYCCLNDRFRLGFKHAFRCCPFISAGDYEGLEMKSTRYLQTQGSVYKVSRLETTISTVVGAHEEEPEDGPKATPSSLDLTSNCSSRSDSKTMTESFSFSSNVLS

SEQ ID NO: 1627 - protein, 407 aa, Homo sapiens
MWPNGSSLGPCFRPTNITLEERRLIASPWFAASFCVVGLASNLLALSVLAGARQGGSHTRSSFLTFLCGLVLTDFLGLLVTGTIVVSQHAALFEWHAVDPGCRLCRFMGVVMIFFGLSPLLLGAAMASERYLGITRPFSRPAVASQRRAWATVGLVWAAALALGLLPLLGVGRYTVQYPGSWCFLTLGAESGDVAFGLLFSMLGGLSVGLSFLLNTVSVATLCHVYHGQEAAQQRPRDSEVEMMAQLLGIMVVASVCWLPLLVFIAQTVLRNPPAMSPAGQLSRTTEKELLIYLRVATWNQILDPWVYILFRRAVLRRLQPRLSTRPRRSLTLWPSLEYSGTISAHCNLRLPGSSDSRASASRAAGITGVSHCARPCMLFDPEFDLLAGVQLLPFEPPTGKALSRKD

SEQ ID NO: 1628 - protein, 398 aa, Homo sapiens
MENETVSELNQTQLQPRAVVALEYQVVTILLVLIICGLGIVGNIMVVLVVMRTKHMRTPTNCYLVSLAVADLMVLVAAGLPNITDSIYGSWVYGYVGCLCITYLQYLGINASSCSITAFTIERYIAICHPIKAQFLCTFSRAKKIIIFVWAFTSLYCMLWFFLLDLNISTYKDAIVISCGYKISRNYYSPIYLMDFGVFYVVPMILATVLYGFIARILFLNPIPSDPKENSKTWKNDSTHQNTNLNVNTSNRCFNSTVSSRKQVTKMLAVVVILFALLWMPYRTLVVVNSFLSSPFQENWFLLFCRICIYLNSAINPVIYNLMSQKFRAAFRKLCNCKQKPTEKPANYSVALNYSVIKESDHFSTELDDITVTDTYLSATKVSFDDTCLASEVSFSQS

SEQ ID NO: 1629 - protein, 787 aa, Homo sapiens
MERLWGLFQRAQQLSPRSSQTVYQRVEGPRKGHLEEEEEDGEEGAETLAHFCPMELRGPEPLGSRPRQPNLIPWAAAGRRAAPYLVLTALLIFTGAFLLGYVAFRGSCQACGDSVLVVSEDVNYEPDLDFHQGRLYWSDLQAMFLQFLGEGRLEDTIRQTSLRERVAGSAGMAALTQDIRAALSRQKLDHVWTDTHYVGLQFPDPAHPNTLHWVDEAGKVGEQLPLEDPDVYCPYSAIGNVTGELVYAHYGRPEDLQDLRARGVDPVGRLLLVRVGVISFAQKVTNAQDFGAQGVLIYPEPADFSQDPPKPSLSSQQAVYGHVHLGTGDPYTPGFPSFNQTQKLKGPVAPQEWQGSLLGSPYHLGPGPRLRLVVNNHRTSTPINNIFGCIEGRSEPDHYVVIGAQRDAWGPGAAKSAVGTAILLELVRTFSSMVSNGFRPRRSLLFISWDGGDFGSVGSTEWLEGYLSVLHLKAVVYVSLDNAVLGDDKFHAKTSPLLTSLIEMPFPNPQVDSPNHSGQTLYEQVVFTNPSWDAEVIRPLPMDSSAYSFTAFVGVPAVEFSFMEDDQAYPFLHTKEDTYENLHKVLQGRLPAVAQAVAQLAGQLLIRLSHDRLLPLDFGRYGDVVLRHIGNLNEFSGDLKARGLTLQWVYSARGDYIRAAEKLRQEIYSSEERDERLTRMYNVRIMAPNPDLIPLSAQVEFYFLSQYVSPADSPFRHIFMGRGDHTLGALLDHLRLLRSNSSGTPGATSSTGFQESRFRRQLALLTWTLQGAANALSGDVWNIDNNF

SEQ ID NO: 1630 - protein, 126 aa, Homo sapiens
DPPVAAAVVSHFNDCPDSHTQFCFHGTCRFLVQEDKPACVCHSGYVGARCEHADLLAVVAASQKKQAITALVVVSIVALAVLIITCVLIHCCQVRKHCEWCRALICRHEKPSALLKGRTACCHSET

SEQ ID NO: 1631 - protein, 255 aa, Homo sapiens
YIRVSYDTKPDSLLHLMVKDWQLELPKLLISVHGGLQNFEMQPKLKQVFGKGLIKAAMTTGAWIFTGGVSTGVISHVGDALKDHSSKSRGRVCAIGIAPWGIVENKEDLVGKDVTRVYQTMSNPLSKLSVLNNSHTHFILADNGTLGKYGAEVKLRRLLEKHISLQKINTRLGQGVPLVGLVVEGGPNVVSIVLEYLQEEPPIPVVICDGSGRASDILSFAHKYCEEGGIINESLREQLLVTIQKTFNYNKAQSH

SEQ ID NO: 1632 - protein, 729 aa, Homo sapiens
MGGFLPKAEGPGSQLQKLLPSFLVREQDWDQHLDKLHMLQQKRILESPLLRASKENDLSVLRQLLLDCTCDVRQRGALGETALHIAALYDNLEAALVLMEAAPELVFEPTTCEAFAGQTALHIAVVNQNVNLVRALLTRRASVSARATGTAFRRSPRNLIYFGEHPLSFAACVNSEEIVRLLIEHGADIRAQDSLGNTVLHILILQPNKTFACQMYNLLLSYDGHGDHLQPLDLVPNHQGLTPFKLAGVEGNTVMFQHLMQKRRHIQWTYGPLTSILYDLTEIDSWGEELSFLELVVSSDKREARQILEQTPVKELVSFKWNKYGRPYFCILAALYLLYMICFTTCCVYRPLKFRGGNRTHSRDITILQQKLLQEAYETREDIIRLVGELVSIVGAVIILLLEIPDIFRVGASRYFGKTILGGPFHVIIITYASLVLVTMVMRLTNTNGEVVPMSFALVLGWCSVMYFTRGFQMLGPFTIMIQKMIFGDLMRFCWLMAVVILGFASAFYIIFQTEDPTSLGQFYDYPMALFTTFELFLTVIDAPANYDVDLPFMFSIVNFAFAIIATLLMLNLFIAMMGDTHWRVAQERDELWRAQVVATTVMLERKLPRCLWPRSGICGCEFGLGDRWFLRVENHNDQNPLRVLRYVEVFKNSDKEDDQEHPSEKQPSGAESGTLARASLALPTSSLSRTASQSSSHRGWEILRQNTLGHLNLGLNLSEGDGEEVYHF

SEQ ID NO: 1633 - protein, 238 aa, Homo sapiens
SVFLEAKDAHSVLKRFPRANEFLEELRQGTIERECMEEICSYEEVKEVFENKEKTALPLFLLQMEFWKGYPNAVYSVRDPSQSSDAMYVVVPLLGVALLIVIALFIIWRCQLQKATRHHPSYAQNRYLASRAGHTLPRVMVYRGTVHSQGEPSGHREAANSPQVVLGPSRGGRTTVRLESTLYLPELSLSRLSSTTPPPSYEEVTAPQESSSEEASVSYSDPPPKYEEIVAANPGADK

SEQ ID NO: 1634 - protein, 464 aa, Homo sapiens
SLMLDDQPPMEAQYAEEGPGPGIFRAEPGDQQHPISQAVCWRSMRRGCAVLGALGLLAGAGVGSWLLVLYLCPAASQPISGTLQDEEITLSCSEASAEEALLPALPKTVSFRINSEDFLLEAQVRDQPRWLLVCHEGWSPALGLQICWSLGHLRLTHHKGVNLTDIKLNSSQEFAQLSPRLGGFLEEAWQPRNNCTSGQVVSLRCSECGARPLASRIVGGQSVAPGRWPWQASVALGFRHTCGGSVLAPRWVVTAAHCMHRQVSVAAEDREPHFRLARLSSWRVHAGLVSHSAVRPHQGALVERIIPHPLYSAQNHDYDVALLRLQTALNFSDTVGAVCLPAKEQHFPKGSRCWVSGWGHTHPSHTYSSDMLQDTVVPLFSTQLCNSSCVYSGALTPRMLCAGYLDGRADACQGDSGGPLVCPDGDTWRLVGVVSWGRGCAEPNHPGVYAKVAEFLDWIHDTAQ

SEQ ID NO: 1635 - protein, 703 aa, Homo sapiens
MRLPDLRPWTSLLLVDAALLWLLQGPLGTLLPQGLPGLWLEGTLRLGGLWGLLKLRGLLGFVGTLLLPLCLATPLTVSLRALVAGASRAPPARVASAPWSWLLVGYGAAGLSWSLWAVLSPPGAQEKEQDQVNNKVLMWRLLKLSRPDLPLLVAAFFFLVLAVLGETLIPHYSGRVIDILGGDFDPHAFASAIFFMCLFSFGSSLSAGCRGGCFTYTMSRINLRIREQLFSSLLRQDLGFFQETKTGELNSRLSSDTTLMSNWLPLNANVLLRSLVKVVGLYGFMLSISPRLTLLSLLHMPFTIAAEKVYNTRHQEVLREIQDAVARAGQVVREAVGGLQTVRSFGAEEHEVCRYKEALEQCRQLYWRRDLERALYLLVRRVLHLGVQMLMLSCGLQQMQDGELTQGSLLSFMIYQESVGSYVQTLVYIYGDMLSNVGAAEKVFSYMDRQPNLPSPGTLAPTTLQGVVKFQDVSFAYPNRPDRPVLKGLTFTLRPGEVTALVGPNGSGKSTVAALLQNLYQPTGGQVLLDEKPISQYEHCYLHSQVVSVGQEPVLFSGSVRNNIAYGLQSCEDDKVMAAAQAAHADDFIQEMEHGIYTDVGEKGSQLAAGQKQRLAIARALVRDPRVLILDEATSALDVQCEQALQDWNSRGDRTVLVIAHRLQAVQRAHQILVLQEGKLQKLAQLQEGQDLYSRLVQQRLMD

SEQ ID NO: 1636 - protein, 392 aa, Homo sapiens
VSAESALITQQDLAPQQRAAPQQKRSSPSEGLCPPGHHISEDGRDCISCKYGQDYSTHWNDLLFCLRCTRCDSGEVELSPCTTTRNTVCQCEEGTFREEDSPEMCRKCRTGCPRGMVKVGDCTPWSDIECVHKESGTKHSGEAPAVEETVTSSPGTPASPCSLSGIIIGVTVAAVVLIVAVFVCKSLLWKKVLPYLKGICSGGGGDPERVDRSSQRPGAEDNVLNEIVSILQPTQVPEQEMEVQEPAEPTGVNMLSPGESEHLLEPAEAERSQRRRLLVPANEGDPTETLRQCFDDFADLVPFDSWEPLMRKLGLMDNEIKVAKAEAAGHRDTLYTMLIKWVNKTGRDASVHTLLDALETLGERLAKQKIEDHLLSSGKFMYLEGNADSAMS

SEQ ID NO: 1637 - protein, 326 aa, Homo sapiens
MASKVSCLYVLTVVCWASALWYLSITRPTSSYTGSKPFSHLTVARKNFTFGNIRTRPINPHSFEFLINEPNKCEKNIPFLVILISTTHKEFDARQAIRETWGDENNFKGIKIATLFLLGKNADPVLNQMVEQESQIFHDIIVEDFIDSYHNLTLKTLMGMRWVATFCSKAKYVMKTDSDIFVNMDNLIYKLLKPSTKPRRRYFTGYVINGGPIRDVRSKWYMPRDLYPDSNYPPFCSGTGYIFSADVAELIYKTSLHTRLLHLEDVYVGLCLRKLGIHPFQNSGFNHWKMAYSLCRYRRVITVHQISPEEMHRIWNDMSSKKHLRC

SEQ ID NO: 1638 - protein, 398 aa, Homo sapiens
MRLREPLLSGSAAMPGASLQRACRLLVAVCALHLGVTLVYYLAGRDLSRLPQLVGVSTPLQGGSNSAAAIGQSSGELRTGGARPPPPLGASSQPRPGGDSSPVVDSGPGPASNLTSVPVPHTTALSLPACPEESPLLVGPMLIEFNMPVDLELVAKQNPNVKMGGRYAPRDCVSPHKVAIIIPFRNRQEHLKYWLYYLHPVLQRQQLDYGIYVINQAGDTIFNRAKLLNVGFQEALKDYDYTCFVFSDVDLIPMNDHNAYRCFSQPRHISVAMDKFGFSLPYVQYFGGVSALSKQQFLTINGFPNNYWGWGGEDDDIFNRLVFRGMSISRPNAVVGRCRMIRHSRDKKNEPNPQRFDRIAHTKETMLSDGLNSLTYQVLDVQRYPLYTQITVDIGTPS

SEQ ID NO: 1639 - protein, 370 aa, Homo sapiens
MGLWALLPGWVSATLLLALAALPAALAANSSGRWWGIVNVASSTNLLTDSKSLQLVLEPSLQLLSRKQRRLIRQNPGILHSVSGGLQSAVRECKWQFRNRRWNCPTAPGPHLFGKIVNRGCRETAFIFAITSAGVTHSVARSCSEGSIESCTCDYRRRGPGGPDWHWGGCSDNIDFGRLFGREFVDSGEKGRDLRFLMNLHNNEAGRTTVFSEMRQECKCHGMSGSCTVRTCWMRLPTLRAVGDVLRDRFDGASRVLYGNRGSNRASRAELLRLEPEDPAHKPPSPHDLVYFEKSPNFCTYSGRLGTAGTAGRACNSSSPALDGCELLCCGRGHRTRTQRVTERCNCTFHWCCHVSCRNCTHTRVLHECL

SEQ ID NO: 1640 - protein, 354 aa, Homo sapiens
MRARPQVCEALLFALALQTGVCYGIKWLALSKTPSALALNQTQHCKQLEGLVSAQVQLCRSNLELMHTVVHAAREVMKACRRAFADMRWNCSSIELAPNYLLDLERGTRESAFVYALSAAAISHAIARACTSGDLPGCSCGPVPGEPPGPGNRWGGCADNLSYGLLMGAKFSDAPMKVKKTGSQANKLMRLHNSEVGRQALRASLEMKCKCHGVSGSCSIRTCWKGLQELQDVAADLKTRYLSATKVVHRPMGTRKHLVPKDLDIRPVKDSELVYLQSSPDFCMKNEKVGSHGTQDRQCNKTSNGSDSCDLMCCGRGYNPYTDRVVERCHCKYHWCCYVTCRRCERTVERYVCK

SEQ ID NO: 1641 - protein, 745 aa, Homo sapiens [sequence omitted]

SEQ ID NO: 1642 - protein, 595 aa, Homo sapiens
MLLLLLLLPPLLCGRVGAKEQKDYLLTMQKSVTVQEGLCVSVLCSFSYPQNGWTASDPVHGYWFRAGDHVSRNIPVATNNPARAVQEETRDRFHLLGDPQNKDCTLSIRDTRESDAGTYVFCVERGNMKWNYKYDQLSVNVTASQDLLSRYRLEVPESVTVQEGLCVSVPCSVLYPHYNWTASSPVYGSWFKEGADIPWDIPVATNTPSGKVQEDTHGRFLLLGDPQTNNCSLSIRDARKGDSGKYYFQVERGSRKWNYIYDKLSVHVTALTHMPTFSIPGTLESGHPRNLTCSVPWACEQGTPPTITWMGASVSSLDPTITRSSMLSLIPQPQDHGTSLTCQVTLPGAGVTMTRAVRLNISYPPQNLTMTVFQGDGTASTTLRNGSALSVLEGQSLHLVCAVDSNPPARLSWTWGSLTLSPSQSSNLGVLELPRVHVKDEGEFTCRAQNPLGSQHISLSLSLQNEYTGKMRPISGVTLGAFGGAGATALVFLYFCIIFVVVRSCRKKSARPAVGVGDTGMEDANAVRGSASQGPLIESPADDSPPHHAPPALATPSPEEGEIQYASLSFHKARPQYPQEQEAIGYEYSEINIPK

SEQ ID NO: 1643 - protein, 313 aa, Homo sapiens
NVVSQSSLTPLMVNGILGESVTLPLEFPAGEKVNFITWLFNETSLAFIVPHETKSPEIHVTNPKQGKRLNFTQSYSLQLSNLKMEDTGSYRAQISTKTSAKLSSYTLRILRQLRNIQVTNHSQLFQNMTCELHLTCSVEDADDNVSFRWEALGNTLSSQPNLTVSWDPRISSEQDYTCIAENAVSNLSFSVSAQKLCEDVKIQYTDTKMILFMVSGICIVFGFIILLLLVLRKRRSLSLSTQRTQGPESARNLEYVSVSPTNNTVYASVTHSNRETEIWTPRENDTITIYSTINHSKESKPTFSRATALDNVV

SEQ ID NO: 1644 - protein, 821 aa, Homo sapiens
AMLRLGLCAAALLCVCRPGAVRADCWLIEGDKGYVWLAICSQNQPPYETIPQHINSTVHDLRLNENKLKAVLYSSLNRFGNLTDLNLTKNEISYIEDGAFLGQSSLQVLQLGYNKLSNLTEGMLRGMSRLQFLFVQHNLIEVVTPTAFSECPSLISIDLSSNRLSRLDGATFASLASLMVCELAGNPFNCECDLFGFLAWLVVFNNVTKNYDRLQCESPREFAGYPLLVPRPYHSLNAITVLQAKCRNGSLPARPVSHPTPYSTDAQREPDENSGFNPDEILSVEPPASSTTDASAGPAIKLHHVTFTSATLVVIIPHPYSKMYILVQYNNSYFSDVMTLKNKKEIVTLDKLRAHTEYTFCVTSLRNSRRFNHTCLTFTTRDPVPGDLAPSTSTTTHYIMTILGCLFGMVIVLGAVYYCLRKRRMQEEKQKSVNVKKTILEMRYGADVDAGSIVHAAQKLGEPPVLPVSRMASIPSMIGEKLPTAKGLEAGLDTPKVATKGNYIEVRTGAGGDGLARPEDDLPDLENGQGSAAEISTIAKEVDKVNQIINNCIDALKLDSASFLGGGSSSGDPELAFECQSLPAAAAASSATGPGALERPSFLSPPYKESSHHPLQRQLSADAAVTRKTCSVSSSGSIKSAKVFSLDVPDHPAATGLAKGDSKYIEKGSPLNSPLDRLPLVPAGSGGGSGGGGGIHHLEVKPAYHCSEHRHSFPALYYEEGADSLSQRVSFLKPLTRSKRDSTYSQLSPRHYYSGYSSSPEYSSESTHKIWERFRPYKKHHREEVYMAAGHALRKKVQFAKDEDLHDILDYWKGVSAQQKL

SEQ ID NO: 1645 - protein, 175 aa, Homo sapiens
LLDCFVIPVVILLSWFFLLIRYKAVHFIGIVVCILGMGCMVGADVLVGRHQGAGENKLVGDLLVLGGATLYGISNVWEEYIIRTLSRVEFLGMIGLFGAFFSGIQLAIMEHKELLKVPWDWQIGLLYVGFSACMFGLYSFMPVVIKKTSATSVNLSLLTADLYSLFCGLFLFHYK

SEQ ID NO: 1646 - protein, 363 aa, Homo sapiens
MAPPPARVHLGAFLAVTPNPGSAASGTEAAAATPSKVWGSSAGRIEPRGGGRGALPTSMGQHGPSARARAGRAPGPRPAREASPRLRVHKTFKFVVVGVLLQVVPSSAATIKLHDQSIGTQQWEHSPLGELCPPGSHRSERPGACNRCTEGVGYTNASNNLFACLPCTACKSDEEERSPCTTTRNTACQCKPGTFRNDNSAEMCRKCSTGCPRGMVKVKDCTPWSDIECVHKESGNGHNIWVILVVTLVVPLLLVAVLIVCCCIGSGCGGDPKCMDRVCFWRLGLLRGPGAEDNAHNEILSNADSLSTFVSEQQMESQEPADLTGVTVQSPGEAQCLLGPAEAEGSQRRRLLVPANGADPTES

SEQ ID NO: 1647 - protein, 552 aa, Homo sapiens
MGPGASGDGVRTETAPHIALDSRVGLHAYDISVVVIYFVFVIAVGIWSSIRASRGTIGGYFLAGRSMSWWPIGASLMSSNVGSGLFIGLAGTGAAGGLAVGGFEWNATWLLLALGWVFVPVYIAAGVVTMPQYLKKRFGGQRIQVYMSVLSLILYIFTKISTDIFSGALFIQMALGWNLYLSTGILLVVTAVYTIAGGLMAVIYTDALQTVIMVGGALVLMFLGFQDVGWYPGLEQRYRQAIPNVTVPNTTCHLPRPDAFHILRDPVSGDIPWPGLIFGLTVLATWCWCTDQVIVQRSLSAKSLSHAKGGSVLGGYLKILPMFFIVMPGMISRALFPDEVGCVDPDVCQRICGARVGCSNIAYPKLVMALMPVGLRGLMIAVIMAALMSSLTSIFNSSSTLFTIDVWQRFRRKSTEQELMVVGRVFVVFLVVISILWIPIIQSSNSGQLFDYIQAVTSYLAPPITALFLLAIFCKRVTEPGAFWGLVFGLGVGLLRMILEFSYPAPACGEVDRRPAVLKDFHYLYFAILLCGLTAIVIVIVSLCTTPIPEEQ

SEQ ID NO: 1648 - protein, 97 aa, Homo sapiens
IVTGLWGQSVTGNRPEERDPFLLFPPTCWHYLAPPLGRTEKGAAGKTEVYFQSVSHSLTKLKHNKARLKLRGNNLIISPVLSCFPIIVLVELMHHIY

SEQ ID NO: 1649 - protein, 436 aa, Homo sapiens
MGLDALVPLAVTVAIFLLLVDLMQQHQRWTARYPPGPLPLPGLGNLLHVDFQNIYTFNQLRHRFGDVFSLQLAWMPVVVLNGLAAVREALVTCGEDTADRPPAPIYQVLGIGPRSQGKRRWGTETAFPWVLGVFLAHYGHAWREQRRFSVSTLRNLGLGKKSLERWVTEEAACLCAAFADQARRPFHPNGLLNKAASNVIASLTCGCRFEYDDPRFLRLLDLAQKGLKEELGFLPAQAKGNPESSFNDENLRMVVADLFFAGMVTTSITLAWGLLLMILRPDVQQMGDQARMPCTTAVIHEVQRFGDIVPLGVTHMTSRDIEVQGFRIPKGMMLFTNLSSVLKDEAVWEKPFRFHPEHFLDAQGHFVKLEAFLPFSAGRRACLGEPLARIELFLFFTSLLQHFSFSVPTGQPRPSHSRVVGFLVTPSPYELCAVPR

SEQ ID NO: 1650 - protein, 197 aa, Homo sapiens
MSMEYFSICFVSTLISLSSCLWFSLKRSFTFFLSCIPRYFFLFVANVNESSFMICLPACLLFVHGNASYFCTLILYPEILLLLLITLRSFGPETMRFSRCRIRSSANKDNLTSSLSIRILFISSSGLIFLAKASDTILNGSGERGHSFLVPVFRWNVSSFCTFSMILAVGLLYMALIIFRYVSSLPSLLRILNLKEC

SEQ ID NO: 1651 - protein, 110 aa, Homo sapiens
NLIDCSQGISQDWVLIRDSSRTGSAFKLPQVAGRIHFVVAAGFVAACFCTSRNGWRERQRQRGREIQQESCYNLMQSLRLISSLCNCELCCIKHAHAGVFFYTVTCIPLG

SEQ ID NO: 1652 - protein, 575 aa, Homo sapiens
MSQDTKVKTTESSPPAPSKARKLLPVLDPSGDYYYWWLNTMVFPVMYNLIILVCRACFPDLQHGYLVAWLVLDYTSDLLYLLDMVVRFHTGFLEQGILVVDKGRISSRYVRTWSFFLDLASLMPTDVVYVRLGPHTPTLRLNRFLRAPRLFEAFDRTETRTAYPNAFRIAKLMLYIFVVIHWNSCLYFALSRYLGFGRDAWVYPDPAQPGFERLRRQYLYSFYFSTLILTTVGDTPPPAREEEYLFMVGDFLLAVMGFATIMGSMSSVIYNMNTADAAFYPDHALVKKYMKLQHVNRKLERRVIDWYQHLQINKKMTNEVAILQHLPERLRAEVAVSVHLSTLSRVQIFQNCEASLLEELVLKLQPQTYSPGEYVCRKGDIGQEMYIIREGQLAVVADDGITQYAVLGAGLYFGEISIINIKGNMSGNRRTANIKSLGYSDLFCLSKEDLREVLSEYPQAQTIMEEKGREILLKMNKLDVNAEAAEIALQEATESRLRGLDQQLDDLQTKFARLLAELESSALKIAYRIERLEWQTREWPMPEDLAEADDEGEPEEGTSKDEEGRASQEGPPGPE

SEQ ID NO: 1653 - protein, 359 aa, Homo sapiens
FTSITDSIIFLCTYSTAKYSVLTFLPRFLYEQIRRAANAFFLFIALLQQIPDVSPTGRYTTLVPLIIILTIAGIKEIVEDFVAVGDIVKVVNGQYLPADVVLLSSSEPQAMCYVETANLDGETNLKIRQGLSHTADMQTREVLMKLSGTIECEGPNRHLYDFTGNLNLDGKSLVALGPDQILLRGTQLRNTQWVFGIVVYTGHDTKLMQNSTKAPLKRSNVEKVTNVQILVLFGILLVMALVSSAGALYWNRSHGEKNWYIKKMDTTSDNFGYNLLTFIILYNNLIPISLLVTLEVVKYTQALFINWDTDMYYIGNDTPAMARTSNLNEELGQFCDHSVFRFSGSHFPELAREPSSDDF

SEQ ID NO: 1654 - protein, 273 aa, Homo sapiens
VNNKRLGVCGWILFSLSFLLVIITFPISIWMCLKIIKEYERAVVFRLGRIQADKAKGPGLILVLPCIDVFVKVDLRTVTCNIPPQEILTRDSVTTQVDGVVYYRIYSAVSAVANVNDVHQATFLLAQTTLRNVLGTQTLSQILAGREEIAHSIQTLLDDATELWGIRVARVEIKDVRIPVQLQRSMAAEAEATREARAKVLAAEGEMNASKSLKSASMVLAESPIALQLRYLQTLSTVATEKNSTIVFPLPMNILEGIGGVSYDNHKKLPNKA

SEQ ID NO: 1655 - protein, 241 aa, Homo sapiens
ACWAPGNGNVSEGPISAPSQDYRVNVFLRQQWNDPRLSYREYPDDSLDLDPSMLDSIWKPDLFFANEKGANFHEVTTDNKLLRIFKNGNVLYSIRLTLILSCLMDLKNFPMDIQTCTMQLESFGYTMKDLVFEWLEDAPAVQVAEGLTLPQFILRDEKDLGCCTKHYNTGKFTCIEVKFHLERQMGYYLIQMYIPSLLIVILSWVSFWINMDAAPARVGLGITTVLTMTTQSSGSRASLPK

SEQ ID NO: 1656 - protein, 392 aa, Homo sapiens
FPFSILFSTFLYCGEAASALYMVRIYRKNSETYWMTYTFSFFMFSSIMVQLTLIFVHRDLAKDKPLSLFMHLILLGPVIRCLEAMIKYLTLWKKEEQEEPYVSLTRKKMLIDGEEVLIEWEVGHSIRTLAMHRNAYKRMSQIQAFLGSVPQLTYQLYVSLISAEVPLGRVVLMVFSLVSVTYGATLCNMLAIQIKYDDYKIRLGPLEVLCITIWRTLEITSRLLILVLFSATLKLKAVPFLVLNFLIILFEPWIKFWRSGAQMPNNIEKNFSRVGTLVVLISVTILYAGINFSCWSALQLRLADRDLVDKGQNWGHMGLHYSVRLVENVIMVLVFKFFGVKVLLNYCHSLIALQLIIAYLISIGFMLLFFQYLHPLRSLFTHNVVDYLHCVC

SEQ ID NO: 1657 - protein, 84 aa, Homo sapiens
MVARLGTFLKNAWAREPVLVVSFIIGSLAVILPPLSPYTKYFIMIYETMPYNYPLPVRNDGNMTNVPGHPQDPQSSSLEWLKKL

SEQ ID NO: 1658 - protein, 184 aa, Homo sapiens
NDEAGLMYGLSPFPGSPFETELGQHVPEMQLVMTVAMAVLVRELLPGALATGYLLYLQIKRDIFHGRLLCSFSDAAYLGACIVQAELGDYDPDEHPENYISEFEIFPKQSQKLERKIVEIHKNELRGQSPPVAEFNLLLKAHTLETYGVDPHPCKDSTGTTTFLGFTAAGFVVFQGNKRIHLIK

SEQ ID NO: 1659 - protein, 124 aa, Homo sapiens
FSPINSGQPPNYEMLKEEHEVAVLGVAYNPAPPTSTVIHIRNETSVPDHVVWSLFNTLFMNPCCLGFIAFAYSVKSRHRKMVGDLTGAQAYASTAKCLNIWALILGIFMTILLIIIPVLIFQAY

SEQ ID NO: 1660 - protein, 543 aa, Homo sapiens
MGDWNLLGGILEEVHSHSTIVGKIWLTILFIFRMLVLRVAAEDVWDDEQSAFACNTRQPGCNNICYDDAFPISLIRFWVLQIIFVSSPSLVYMGHALYRLRAFEKDRQRKKSHLRAQMENPDLDLEEQQRIDRELRRLEEQKRIHKVPLKGCLLRTYVLHILTRSVLEVGFMIGQYILYGFQMHPLYKCTQPPCPNAVDCFVSRPTEKTIFMLFMHSIAAISLLLNILEIFHLGIRKIMRTLYKKSSSEGIEDETGPPFHLKKYSVAQQCMICSSLPERISPLQANNQQQVIRVNVPKSKTMWQIPQPRQLEVDPSNGKKDWSEKDQHSGQLHVHSPCPWAGSAGNQHLGQQSDHSSFGLQNTMSQSWLGTTTAPRNCPSFAVGTWEQSQDPEPSGEPLTDLHSHCRDSEGSMRESGVWIDRSRPGSRKASFLSRLLSEKRHLHSDSGSSGSRNSSCLDFPHWENSPSPLPSVTGHRTSMVRQAALPIMELSQELFHSGCFLFPFFLPGVCMYVCVDREADGGGDYLWRDKIIHSIHSVKFNS

SEQ ID NO: 1661 - protein, 232 aa, Homo sapiens
SRFMNHRVPAHKRYQPTEYEHAANCATHAFWIIPSILGSSNLYFLSDDDWETISAWIYGLGLCGLFVVSTVFHTISWKKSHLRMVEHCLHMFDRMVIYFFIAASYAPWLNLRELGPWASHMRWLVWIMASVGTIYVFFFHERYKLVELLCYVVMGFFPALVILSMPNTEGIWELVTGGVFYCLGMVFFKSDGRIPFAHAIWHLFVAFGAGTHYYAIWRYLYLPSTLQTKVSK

SEQ ID NO: 1662 - protein, 302 aa, Homo sapiens
FLLLGISEDPELQPVLAGLTLSMYLVTVLRNLLIILAVSSDSHLHTSMYFVLSNLRWVDIGFTSATVPKMIVDMQSHSRVISYAGCLTQMSFLVFFACIEDMLLTVMSYDQFLAICHPLHYPVIVNPHFCVFLVLVSFFLSLLDSQLHRWIVLQFTFFKNVEISNFVCEPSQLLNLACSDSVINIIFIYLDSTMFGFLPISGILLSYYKIVPSILRMSLSDVKYKAFSTCGSHLAVFCLFYGAGIGVYLTSAVSPPSGNGVVASVMYTVVTPMLNPFIYSLRNRDIQSAPWRLRSTTVESHD

SEQ ID NO: 1663 - protein, 315 aa, Homo sapiens
ENQTILVEFFLKGHSVHPRLELLFFVLIFIMYVVILLGNGTLILISILDPHLHTPMYFFLGNLSFLDICYTTTSIPSTLVSFLSERKTISFSGCAVQMFLGLAMGTTECVLLGMMAFDRYVAICNPLRYPIIMSKNAYVPMAVGSWFAGIVNSAVQTTFVVQLPFCRKNVINHFSCEILAVMKLACADISGNEFLMLVATILFTLMPLLLIVISYSLIISSILKIHSSEGRSKAFSTCSAHLTVVIIFYGTILFMYMKPKSKETLNSDDLDATDKIISMFYGVMTPMMNPLIYSLRNKDVKEAVKHLPNRRFFSK

SEQ ID NO: 1664 - protein, 307 aa, Homo sapiens
METRNYSAMTEFFLVGLSQYPELQLFLFLLCLIMYMIILLGNSLLIIITILDSRLHTPMYFFLGNLSFLDICYTSSSIPPMLIIFMSERKSISFIGCALQMVVSLGLGSTECVLLAVMAYDHYVAICNPLRYSIIMNGVLYVQMAAWSWIIGCLTSLLQTVLTMMLPFCGNNVIDHITCEILALLKLVCSDITINVLIMTVTNIVSLVILLLLIFISYVFILSSILRINCAEGRKKAFSTCSAHSIVVILFYGSALFMYMKPKSKNTNTSDEIIGLSYGVVSPMLNPIIYSLRNKEVKEAVKKVLSR

SEQ ID NO: 1665 - protein, 235 aa, Homo sapiens
LARGHQVALSSISYVGCSLSVLCLVATLVTFAVLSSVSTIRNQRYHIHANLSFAVLVAQVLLLISFRLEPGTTPCQVMAVLLHYFFLSAFAWMLVEGLHLYSMVIKVFGSEDSKHRYYYGMGWGFPLLICIISLSFAMDSYGTSNNCWLSLASGAIWAFVAPALFVIVGSSGPVTEGLISRNAQEGGAFQAGPLEAPGLFQSRRQVNIGILIAVTRVISQISADNYKIHGDPSAF

SEQ ID NO: 1666 - protein, 255 aa, Homo sapiens
MPLPDGARTPGGVCREARGGGYTNRTFEFDDGQCAPRRPCAGDGALLDTAGFKMSDLDSEVLPLPPRYRFRDLLLGDPSFQNDDRMARAKLPRSPSEGKAGPGGAPAGAAAPEEPHGLSPLLPARGGGSVGSDVGQRLPVEDFSLDSSLSQVQVEFYVNENTFKERLKLFFIKNQRSSLRIRLFNFSLKLLTCLLYIVRVLLDDPALGIGCWGCPKQNYSFNDSSSEINWAPILWVERKMTLWAIQVIVAIISFL

SEQ ID NO: 1667 - protein, 505 aa, Homo sapiens
MEQTEKSKVYAENGLLEKIKLCLSKKPLPSPTERKKFDHDFAISTSFHGIHNIVQNRSKIRRVLWLVVVLGSVSLVTWQIYIRLLNYFTWPTTTSIEVQYVEKMEFPAVTFCNLNRFQTDAVAKFGVIFFLWHIVSKVLHLQEITANSTGSREATDFAASHQNFSIVEFIRNKGFYLNNSTLLDCEFFGKPCSPKDFAHVFTEYGNCFTFNHGETLQAKRKVSVSGRGLSLLFNVNQEAFTDNPALGFVDAGIIFVIHSPKKVPQFDGLGLLSPVGMHARVTIRQVKTVHQEYPWGECNPNIKLQNFSSYSTSGCLKECKAQHIKKQCGCVPFLLPGYGIECDLQKYFSCVSPVLDHIEFKDLCTVGTHNSSCPVSCEEIEYPATISYSSFPSQKALKYLSKKLNQSRKYIRENLVKIEINYSDLNYKITQQQKAVSVSELLADLGGQLGLFCGASLITIIEIIEYLFTNFYWICIFFLLKISEMTQWTPPPQNHLGNKNRIEEC

SEQ ID NO: 1668 - protein, 179 aa, Homo sapiens
HFGLWSVLMVLILNSTLFFFQNLSSYCHSQINSTLKGRWRVSPSHRALALLLCLLTPPFTHSIRELLPLNRGAALDQAHRDVADQWAGGCVPGKPGRQPGRQQARPLPTQQSCRGLHAHPPLLGVCFIFLYFQNEHPPDSLPGMIDAGGGSFSQSLASDPASRGRRGFCAPAGGRSGMC

SEQ ID NO: 1669 - protein, 109 aa, Homo sapiens
FVRSNYTALLGVWIYGFFVLMLLVLDLLYYSAMNYDICKVYLARWGIQGRWMKQDPRRWGNPARAPRPGQRAPQPQPPPGPLPQAPQAVHTLRGDAHSPPLMTFQSSSA

SEQ ID NO: 1670 - protein, 808 aa, Homo sapiens
NLKEITLIVGVVTACYWNSLFCGFVFDDVSAILDNKDLHPSTPLKTLFQNDFWGTPMSEERSHKSYRPLTVLTFRLNYLLSELKPMSYHLLNMIFHAVVSVIFLKVCKLFLDNKSSVIASLLFAVHPIHTEAVTGVVGRAELLSSIFFLAAFLSYTRSKGPDNSIIWTPIALTVFLVAVATLCKEQGITVVGICCVYEVFIAQGVSQTYINFLIDIFYPVESNFIYFYFLNVSLCKLMCLPIIIPEIIFICNLFFNPLYRFDNPAAVSPTPTRQLTFNYLLPVNAWLLLNPSELCCDWTMGTIPLIESLLDIRNLATFTFFCFLGMLGVFSIRYSGDSSKTVLMALCLMALPFIPASNLFFPVGFVVAERVLYVPSMGFCILVAHGWQKISTKSVFKKLSWICLSMVILTHSLKTFHRNWDWESEYTLFMSALKVNKNNAKLWNNVGHALENEKNFERALKYFLQATHVQPDDIGAHMNVGRTYKNLNRTKEAEESYMMAKSLMPQIIPGKKYAARIAPNHLNVYINLANLIRANESRLEEADQLYRQAISMRPDFKQAYISRGELLLKMNKPLKAKEAYLKALELDRNNADLWYNLAIVHIELKEPNEALKNFNRALELNPKHKLALFNSAIVMQESGEVKLRPEARKRLLSYINEEPLDANGYFNLGMLAMDDKKDNEAEIWMKKAIKLQADFRSALFNLALLYSQTAKELKALPILEELLRYYPDHIKGLILKGDILMNQKKDILGAKKCFERILEMDPSNVQGKHNLCVVYFEEKDLLKAERCLLETLALAPHEEYIQRHLNIV

SEQ ID NO: 1671 - protein, 87 aa, Homo sapiens
NPPDWSKNVEYITEFVNLGNVSALRTFRVLRALKTISVIPGLKTIVGALIQSVKKLSDVMILTVFCLSVFALIGLQLFMGNLRNKCV

SEQ ID NO: 1672 - protein, 136 aa, Homo sapiens [sequence omitted]

SEQ ID NO: 1673 - protein, 74 aa, Homo sapiens
SPSVLTKPQVYGLLAKYLWFHIVGAFVVFWLVAALYQIAVAEPRKKAYTDFYRNYDSMKDFEDMRKTGTFQSAK

SEQ ID NO: 1674 - protein, 294 aa, Homo sapiens
MKGGEGDAGEQAPLNPEGESPAGSATYREFVHRGYLDLMGASQHSLRALSWRRLYLSRAKLKASSRTSALLSGFAMVAMVEVQLESDHEYPPGLLVAFSACTTVLVAVHLFALMVSTCLLPHIEAVSNIHNLNSVHQSPHQRLHRYVELAWGFSTALGTFLFLAEVVLVGWVKFVPIGAPLDTPTPMVPTSRVPGTLAPVATSLSPASNLPRSSASAAPSQAEPACPPRQACGGGGAHGPWQAAMASTAIMVPVGLVFVAFALHFYRSLVAHKTDRYKQELEELNRLQGELQAV

SEQ ID NO: 1675 - protein, 255 aa, Homo sapiens
MVGEGPYLISDLDQRGRRRSFAERYDPSLKTMIPVRPCARLAPNPVDDAGLLSFATFSWLTPVMVKGYRQRLTVDTLPPLSTYDSSDTNAKRFRVLWDEEVARVGPEKASLSHVVWKFQRTRVLMDIVANILCIIMAAIGPTVLIHQILQQTERTSGKVWVGIGLCIALFATEFTKVFFWALAWAINYRTAIRLKVALSTLVFENLVSFKTLTHISVGEVLNILSSDSYSLFEAALFCPLPATIPILMVFCAAYA

SEQ ID NO: 1676 - protein, 756 aa, Homo sapiens
WEASLALQHASEALLTVSAKARPEDQRRQAATRDLFQAVGSVLEASLSNRPEEPAEASSSQIATVLRLLRVMEHVQTTLLLGKLPGGLPAMLATPSISVYTNRIQPWSWQGSSLRPDAADSATFMLPAASSLSSLEGGQEPVDIKIMSFPKSPFPARSHFDVSGTVGGLRVTSPSGQLIPVKNLSENIEILLPRHSQRHSQPTVLNLTSPEALWVNVTSGEATLGIQLHWRPDIALTLSLGYGYHPNKSSYDAQTHLVPMVAPDELPTWILSPQDLRFGEGVYYLTVVPESDLEPAPGRDLTVGITTFLSHCVFWDEVQETWDDSGCQVGPRTSPYQTHCLCNHLTFFGSTFLVMSNAINIHQTAELFATFEDNPVVVTTVGCLCVVYVLVVIWARRKDAQDQAKVKVTVLEDNDPFAQYHYLVTVYTGHRRGAATSSKVTVTLYGLDGEREPHHLADPDTPVFERGAVDAFLLSTLFPLGELRSLRLWHDNSGDRPSWYVSRVLVYDLVMDRKWYFLCNSWLSINVGDCVLDKVFPVATEQDRKQFSHLFFMKTSAGFQDGHIWYSIFSRCARSSFTRVQRVSCCFSLLLCTMLTSIMFWGVPKDPAEQKMDLGNSQCHGGKIEFTWQEVMIGLESSILMFPINLLIVQIFQNTRPRVAKEQNTGKWDRGSPNLTPSPQPMEDGLLTPEAVTKAALKVPSPALGWDSVNLMDINSLLALVEDVIYPQNTSGQVFWEEAKKREDPVTLTLGSSEMK

SEQ ID NO: 1677 - protein, 298 aa, Homo sapiens
MAGGMSAECPEPGPGGLQGQSPGPGRQCPPPITPTSWSLPPWRAYVAAAVLCYINLLNYMNWFIIAGVLLDIQEVFQISDNHAGLLQTVFVSCLLLSAPVFGYLGDRHSRKATMSFGILLWSGAGLSSSFISPRYSWLFFLSRGIVGTGSASYSTIAPTVLGDLFVRDQRTRVLAVFYIFIPVGSGLGYVLGSAVTMLTGNWRWALRVMPCLEAVALILLILLVPDPPPGSCRDTGGGGRGRLQEQLVWSFVWSTLGVTAMAFVTGALGFWAPKFLLEARVVHGLQPPCFQEPCSNPD

SEQ ID NO: 1678 - protein, 343 aa, Homo sapiens
SHSWGFVHPRLLSVPELCHHVAEVWVSGTIFIRNVLLFKKQNPGKFCLLSCGILTFLAVLGRYVPGLLLSYLMLVTVMMWPLAVYHRLWDRAYVRLKPALQRLDFSVRGYMMSKQRERQLRRRALHPERAMDNHSDSEEELAAFCPQLDDSTVARELAITDSEHSDAEVSCTDNGTFNLSRGQTPLTEGSEDLDGHSDPEESFARDLPDFPSINMDPAGLDDEDDTSIGMPSLMYRSPPGAEEPQAPPASRDEAALPELLLGALPVGSNLTSNLASLVSQGMIQLALSGASQPGPSGAPAQRATRGFLRSPSSDLDTDAEGDDFELLDQSELSQLDPASSRSH

SEQ ID NO: 1679 - protein, 78 aa, Homo sapiens
MTLQKMSKLVWPSLFFSSGIPIMHMLVLIVTHRFPTWFIFHSHFCSSDCVICIDLSLSSLILPSAFKFAVVPLMKLSL

SEQ ID NO: 1680 - protein, 67 aa, Homo sapiens
DHLIWSVFSTLYLNLCCLGFLALAYSIKARDQKVVGDLEAARRFGSKAKCYNILAAMWTLVPPLLLL

SEQ ID NO: 1681 - protein, 697 aa, Homo sapiens
MLLPLLLSSLLGGSQAMDGRFWIRVQESVMVPEGLCISVPCSFSYPRQDWTGSTPAYGYWFKAVTETTKGAPVATNHQSREVEMSTRGRFQLTGDPAKGNCSLVIRDAQMQDESQYFFRVERGSYVRYNFMNDGFFLKVTALTQKPDVYIPETLEPGQPVTVICVFNWAFEECPPPSFSWTGAALSSQGTKPTTSHFSVLSFTPRPQDHNTDLTCHVDFSRKGVSAQRTVRLRVAYAPRDLVISISRDNTPALEPQPQGNVPYLEAQKGQFLRLLCAADSQPPATLSWVLQNRVLSSSHPWGPRPLGLELPGVKAGDSGRYTCRAENRLGSQQRALDLSVQYPPENLRVMVSQANRTVLENLGNGTSLPVLEGQSLCLVCVTHSSPPARLSWTQRGQVLSPSQPSDPGVLELPRVQVEHEGEFTCHARHPLGSQHVSLSLSVHYSPKLLGPSCSWEAEGLHCSCSSQASPAPSLRWWLGEELLEGNSSQDSFEVTPSSAGPWANSSLSLHGGLSSGLRLRCEAWNVHGAQSGSILQLPDKKGLISTAFSNGAFLGIGITALLFLCLALIIMKILPKRRTQTETPRPRFSRHSTILDYINVVPTAGPLAQKRNQKATPNSPRTPLPPGAPSPESKKNQKKQYQLPSFPEPKSSTQAPESQESQEELHYATLNFPGVRPRPEARMPKGTQADYAEVKFQ

SEQ ID NO: 1682 - protein, 100 aa, Homo sapiens
METRQVSRSPRVRLLLLLLLLLVVPWGVRTASGVALPPVGVLSLRPPGRAWADPATPRPRRSLALADDAAFRERARLLAALERRHWLNSYMHKLLVLDAP

SEQ ID NO: 1683 - protein, 489 aa, Homo sapiens
RLQPTLLLATLSAAFGSAFQYGYNLSVVNTPHKVFKSFYNETYFERHATFMDGKLMLLLWSCTVSMFPLGGLLGSLLVGLLVDSCGRKGTLLINNIFAIIPAILMGVSKVAKAFELIVFSRVVLGVCAGISYSALPMYLGELAPKNLRGMVGTMTEVFVIVGVFLAQIFSLQAILGNPAGWPVLLALTGVPALLQLLTLPFFPESPRYSLIQKGDEATARQALRRLRGHTDMEAELEDMRAEARAERAEGHLSVLHLCALRSLRWQLLSIIVLMAGQQLSGINAINYYADTIYTSAGVEAAHSQYVTVGSGVVNIVMTITSAVLVERLGRRHLLLAGYGICGSACLVLTVVLLFQRLEWAASRQPWGTPGSFSAPPILLCPPGPVPSVVRTEIFLQSSRRAAFMVDGAVHWLTNFIIGFLFPSIQEAIGAYSFIIFAGICLLTAIYIYVVIPETKGKTFVEINRIFAKRNRVKLPEEKEETIDAGPPTA

SEQ ID NO: 1684 - protein, 473 aa, Homo sapiens
MTVSYTLKVAEARFGGFSGLLLRWRGSIYKLLYKEFLLFGALYAVLSITYRLLLTQEQRYVYAQVARYCNRSADLIPLSFVLGFYVTLVVNRWWSQYTSIPLPDQLMCVISASVHGVDQRGRLLRRTLIRYANLASVLVLRSVSTRVLKRFPTMEHVVDAGFMSQEERKKFESLKSDFNKYWVPCVWFTNLAAQARRDGRIRDDIALCLLLEELNKYRAKCSMLFHYDWISIPLVYTQVVTIAVYSFFALSLVGRQFVEPEAGAAKPQKLLKPGQEPAPALGDPDMYVPLTTLLQFFFYAGWLKVAEQIINPFGEDDDDFETNQLIDRNLQVSLLSVDEMYQNLPPAEKDQYWDEDQPQPPYTVATAAESLRPSFLGSTFNLRMSDDPEQSLQVEASPGSGRPAPAAQTPLLGRFLGVGAPSPAISLRNFGRVRGTPRPPHLLRFRAEEGGDPEAAARIEEESAESGDEALEP

SEQ ID NO: 1685 - protein, 174 aa, Homo sapiens
SLYNTPCVLDLQRALVQDRQEAPWNEVDEVWPNVFIAEKSVAVNKGRLKRLGITHILNAAHGTGVYTGPEFYTGLEIQYLGVEVDDFPEVDISQHFRKASEFLDEALLTYRGKVLVSSEMGISRSAVLVVAYLMIFHNMAILEALMTVRKKRAIYPNEGFLKQLRELNEKLMEE

SEQ ID NO: 1686 - protein, 368 aa, Homo sapiens
MLDGSPLARWLAAAFGLTLLLAALRPSAAYFGLTGSEPLTILPLTLEPEAAAQAHYKACDRLKLERKQRRMCRRDPGVAETLVEAVSMSALECQFQFRFERWNCTLEGRYRASLLKRGFKETAFLYAISSAGLTHALAKACSAGRMERCTCDEAPDLENREAWQWGGCGDNLKYSSKFVKEFLGRRSSKDLRARVDFHNNLVGVKASGVIKAGVETTCKCHGVSGSCTVRTCWRQLAPFHEVGKHLKHKYETALKVGSTTNEAAGEAGAISPPRGRASGAGGSDPLPRTPELVHLDDSPSFCLAGRFSPGTAGRRCHREKNCESICCGRGHNTQSRVVTRPCQCQVRWCCYVECRQCTQREEVYTCKG

SEQ ID NO: 1687 - protein, 419 aa, Homo sapiens
MRNIFKRNQEPIVAPATTTATMPIGPVDNSTESGGAGESQEDMFAKLKEKLFNEINKIPLPPWALIAIAVVAGLLLLTCCFCICKKCCCKKKKNKKEKGKGMKNAMNMKDMKGGQDDDDAETGLTEGEGEGEEEKEPENLGKLQFSLDYDFQANQLTVGVLQAAELPALDMGGTSDPYVKVFLLPDKKKKYETKVHRKTLNPAFNETFTFKVPYQELGGKTLVMAIYDFDRFSKHDIIGEVKVPMNTVDLGQPIEEWRDLQGGEKEEPEKLGDICTSLRYVPTAGKLTVCILEAKNLKKMDVGGLSDPYVKIHLMQNGKRLKKKKTTVKKKTLNPYFNESFSFEIPFEQIQKVQVVVTVLDYDKLGKNEAIGKIFVGSNATGTELRHWSDMLANPRRPIAQWHSLKPEEEVDALLGKNK

SEQ ID NO: 1688 - protein, 82 aa, Homo sapiens
ILCQIISQVKKHPSLMPLFVFIGVGDTGAALYLLFLALFNPDVNWDRKNNSEPWNKLDPNDQYKFYSVNVDYSKLKKEGPDF

SEQ ID NO: 1689 - protein, 294 aa, Homo sapiens
EFLLLGLSEDPELQTILAGLSLSMYLVTVLRNLLSILAVSSDSHPHTPMYFFLSNLCWADIGFTLATVPKMIVDMGSHSRVISYGGCLTQMSFLVLFACIVNMFLTVMAYDCFVAICRPLHYPVIVNPHLCVFFVLVSFFLSLLDSQLHSWIVLQFTFFKNVEISNFVCEPSQLLKLASYDSVINSIFIYFDNTMFGFLPISGILLSYYKIVPSILRISSSDGKYKAFSACGCHLAVVCLFYGTGIGVYLTSAVAPPLRNGMVASVMYAVVTPMLNPFIYSLRNRDIQSALWRV

SEQ ID NO: 1690 - protein, 505 aa, Homo sapiens
LALGCLSLLVTVQHTERYVTLFASIILKCDYTTSAQLQDVVVTWRFKSFCKDPIFDYYSASYQAALSLGQDPSNDCNDNQREVRIVAQRRGQNEPVLGVDYRQRKITIQNRADLVINEVMWWDHGVYYCTIEAPGDTSGDPDKEVKLIVLHWLTVIFIILGALLLLLLIGVCWCQCCPQYCCCYIRCPCCPAHCCCPEEALARHRYMKQAQALGPQMMGKPLYWGADRSSQVSSYPMHPLLQRDLSLPSSLPQMPMTQTTNQPPIANGVLEYLEKELRNLNLAQPLPPDLKGRFGHPCSMLSSLGSEVVERRIIHLPPLIRDLSSSRRTSDSLHQQWLTPIPSRPWDLREGRSHHHYPDFHQELQDRGPKSWALERRELDPSWSGRHRSSRLNGSPIHWSDRDSLSDVPSSSEARWRPSHPPFRSRCQERPRRPSPRESTQRHGRRRRHRSYSPPLPSGLSSWSSEEDKERQPQSWRAHRRGSHSPHWPEEKPPSYRSLDITPGK

SEQ ID NO: 1691 - protein, 377 aa, Homo sapiens
MRANCSSSSACPANSSEEELPVGLEVHGNLELVFTVVSTVMMGLLMFSLGCSVEIRKLWSHIRRPWGIAVGLLCQFGLMPFTAYLLAISFSLKPVQAIAVLIMGCCPGGTISNIFTFWVDGDMDLSISMTTCSTVAALGMMPLCIYLYTWSWSLQQNLTIPYQNIGITLVCLTIPVAFGVYVNYRWPKQSKIILKIGAVVGGVLLLVVAVAGVVLAKGSWNSDITLLTISFIFPLIGHVTGFLLALFTHQSWQRCRTISLETGAQNIQMCITMLQLSFTAEHLVQMLSFPLAYGLFQLIDGFLIVAAYQTYKRRLKNKHGKKNSGCTEVCHTRKSTSSRETNAFLEVNEEGAITPGPPGPMDCHRALEPVGHITSCE

SEQ ID NO: 1692 - protein, 143 aa, Homo sapiens
GAASVIVGHPLDTVKTRLQAGVGYGNTLSCIRVVYRRESMFGFFKGMSFPLASIAVYNSVVFGVFSNTQRFLSQHRCGEPEASPPRTLSDLLLASMVAGVVSVGLGGPVDLIKIRLQMQTQPFRDGKRPGERRLVSGTCGPFL

SEQ ID NO: 1693 - protein, 209 aa, Homo sapiens
QVYGAVMNINRGNPFQKEVVLDSWPDFKAVITRRQREAETDNLDHYTNAYAVFYKDVRAYRQLLEECDVFNWDQVFQIQGEVKCKTYITQSFFSSLAYIQIVLFVFVSFWSSKGPSPRLTYLSVANADLLNRTWSRGGNEQCLRYIANLISCFPSVCVRDEKGNPVSWSITDQFATMCHGYTLPEHRRKGYSRLVALTLARKLQSRGFP

SEQ ID NO: 1694 - protein, 159 aa, Homo sapiens
LFEILAKTPYGHEKKNLLGIHQLLAEGVLSAAFPLHDGPFKTPPEGPQAPRLNQRQVLFQHWARWGKWNKYQPLDHVRRYFGEKVALYFAWLGFYTGWLLPAAVVGTLVFLVGCFLVFSDIPTQELCGSKDSFEMCPLCLDCPFWLLSSACALAQVREE

SEQ ID NO: 1695 - protein, 272 aa, Homo sapiens
SWHSQAYALGAVSNFMSTFLTFPIYKVVFRQQIHAMAVSEAVRQLWHEGPQYFYRGIYPPLLSKTLQGTLLFGTYDSLLCFLSPVGPHTLGHRWAAGLMSGVVEAVALSPFERVQNVLQDGRKQARFPSTFSILKEFNSYGLWGRLSLGYYRGFWPVLARNSLGSALYFSFKDPIQDGLAEQGLPHWVPALVSGSVNGTITCLVLYPLIVLVANMQSHIGWQNMPSLWASAQDVWNTRGRKLLLIYRGGSLVILRSSVTWGLTTAIHDFLQR

SEQ ID NO: 1696 - protein, 335 aa, Homo sapiens
MESSFSFGVILAVLASLIIATNTLVAVAVLLLIHKNDGVSLCFTLNLAVADTLIGVAISGLLTDQLSSPSRPTQKTLCSLRMAFVTSSAAASVLTVMLITFDRYLAIKQPFRYLKIMSGFVAGACIAGLWLVSYLIGFLPLGIPMFQQTAYKGQCSFFAVFHPHFVLTLSCVGFFPAMLLFVFFYCDMLKIASMHSQQIRKMEHAGAMAGGYRSPRTPSDFKALRTVSVLIGSFALSWTPFLITGIVQVACQECHLYLVLERYLWLLGVGNSLLNPLIYAYWQKEVRLQLYHMALGVKKVLTSFLLFLSARNCGPERPRESSCHIVTISSSEFDG

SEQ ID NO: 1697 - protein, 212 aa, Homo sapiens
MGVAILEPTLPIWMMQTMCSPKWQLGLAFLPASVSYLIGTNLFGVLANKMGRWLCSLIGMLVVGTSLLCVPLAHNIFGLIGPNAGLGLAIGMVDSSMMPIMGHLVDLRHTSVYGSVYAIADVAFCMGFAIGPSTGGAIVKAIGFPWLMVITGVINIVYAPLCYYLRSPPAKEEKLAILSQDCPMETRMYATQKPTKEFPLGEDSDEEPDHEE

SEQ ID NO: 1698 - protein, 51 aa, Homo sapiens
MGYYTFIFSVSLHSFSGLWVCVCVCVCFTHYVLGTISGTWNLHYCRGTTGN

SEQ ID NO: 1699 - protein, 140 aa, Homo sapiens
METLYRVPLVLKCPNLKLKKPTRLHMPSAMTMYALVVVSCFLITRGIIYDVIVEPQSVGSVTDEHGHQRPVAFLVYRVNGQYIMEGLASSFLFTMEGLGFIILYQSNAPNIPKPSRFLLLFIGFVCVLLSFFMARVFMRM

SEQ ID NO: 1700 - protein, 146 aa, Homo sapiens
MCTPIRGLLMALAVMFGTAMAFAPIPRITWEHREVHLVQFHEPDIYNYSALLLSEDKDTLYIGAREAVFAVNALNISEKQHETECLNYIRVLQPLSATSLYVCGTNAFQPACDHLNLTSFKFLGKNEDGKGRCPFDPAHSYTSVMV

SEQ ID NO: 1701 - protein, 347 aa, Homo sapiens
MHRRRLALGLGFCLLAGTSLSVLWVYLENWLPVSYVPYYLPCPEIFNMKLHYKREKPLQPVVWSQYPQPKLLEHRPTQLLTLTPWLAPIVSEGTFNPELLQHIYQPLNLTIGVTVFAVGKYTHFIQSFLESAEEFFMRGYRVHYYIFTDNPAAVPGVPLGPHRLLSSIPIQGHSHWEETSMRRMETISQHIAKRAHREVDYLFCLDVDMVFRNPWGPETLGDLVAAIHPSYYAVPRQQFPYERRRVSTAFVADSEGDFYYGGAVFGGQVARVYEFTRGCHMAILADKANGIMAAWREESHLNRHFISNKPSKVLSPEYLWDDRKPQPPSLKLIRFSTLDKDISCLRS

SEQ ID NO: 1702 - protein, 158 aa, Homo sapiens
MASGRLIKFVVFELLEFAAFSIPTLVITEQFATAYQGTRARSDNTHYWLIISCSIAYVALVTLLIWVPVKVILHKKRYIYRKIKGWRPVLMMCVVLTTLPCLTFSIAVTEVQKSINGSADVLPDMLPDLPVSLVLLSLIMVDIINSGYILLEGVKRVS

SEQ ID NO: 1703 - protein, 278 aa, Homo sapiens
YCSIQAEGTSQNTSRKEDFNQTLTSNEQTSRADDLIETAKVFVNNLSTVCEKVWTLGLHQTFLLMLIIGRWLLPIGGGITRDQLSQLLLMFVGTAADILEFTSETLEEQNVRNSPALVYAILVIWTWSMLQFPLDLAVQNVVCPVSVTERGFPSLFFCQYSADLWNIGISVFIQDGPFLVVRLILMTYFKVINQMLVFFAAKNFLVVVLQLYRLVVLALAVRASLRSQSEGLKGEHGCRAQTSESGPSQRDWQNESKEGLAIPLRGSPVTSDDSHHTP

SEQ ID NO: 1704 - protein, 255 aa, Homo sapiens
MALKPCLEAPIESGLCSGIECHAEHPTLVLMLFASVLVTCLEAAKLTVGFQTPWNISHPFSMQRLGAGLQIAMDKVNSELVDLGNFTTYTNSACSTKESLAIFNNQVQNEQISALFGPACPEAAEVIGLLASEWNPMFDFVGQTTKLSDTCVKLVSPKQDIGDVLQESLQYLGWKHIGMFGGYSGASSWDGVDELWRVVENELKSHFIITASMRYTNNSLVLLQEHLWRISSIARVIILTCSSEDAKIILLAAAN

SEQ ID NO: 1705 - protein, 130 aa, Homo sapiens
VGRKSAIAASVCGALFIRYCIYFYHKRRSDPNFKNRLRERRKKQKLPKERAGFSKLPDLKDADAVQKFFLEETQLGEELLAQGKYEKGVDHLTNAIAVCGQPQQLLQVLQQTLPPPVFQMPLTKLPTIRE

SEQ ID NO: 1706 - protein, 551 aa, Homo sapiens
WRSWHLGFWKALAPLQAAWDAFSQPVPASCGQLLTQLLLCASLAAAAAGLVYHWLASLLLYPPGPSAMVATVCGLLVFLSLGLVPPVRCLFALSVPTLGMEQGRRLLLSYSTATLAIAVVPNVLANVGAAGQVLRCVTEGSLESLLNTTHQLHAASRALGPTGQAGSRGLTFEAQDNGSAFYLHMLRVTQQVLEDFSGLESLARAAALGTQRVVTGLFMLGLLVESAWYLHCYLTDLRFDNIYATQQLTQRLAQAQATHLLAPPPTWLLQAAQLRLSQEELLSCLLRLGLLALLLVATAVAVATDHVAFLLAQATVDWAQKLPTVPITLTVKYDVAYTVLGFIPFLFNQLAPESPFLSVHSSYQWELRLTSARCPLLPARRPRAAAPLAAGALQLLAGSTVLLEAYARRLRHAIAASFFTAQEARRVRHLHARLQRRHDRHQGQQLPLGDPSCVPTPRPACKPPAWIDYRLDALRTESSEGEGKELWSCRDLSCNLGPVPPPCVTLGKSLHLSEPRFLHLHNDSIFTIDVTYFPRRDVVRMEGNTGHDRPG

SEQ ID NO: 1707 - protein, 103 aa, Homo sapiens
AACCTMKSAKLGFLLRFFIFCSLNTLLLGGVNKIAEKICGDLKDPCKLDMNFGSCYEVHFRYFYNRTSKRCETFVFSGCNGNLNNFKLKIEREVACVAKYKPP

SEQ ID NO: 1708 - protein, 401 aa, Homo sapiens
MGSHESLGPYFLVFLLLLLLPPPLFRAGSLRYHGPDWRIFHRLALGSRRAHHHHGPGWRQHWRQGQAGHRCQGSFDLYFILDKSGSVNNNWIDLYMWVEETVARFQSPNIRMCFITYSTDGQTVLPLTSDKNRIKNGLDQLQKIVPDGHTFMQAGFRKAIQQIESFNSGNKVPSMIIAMTDGELVAHAFQDTLREAQKARKLGANVYTLGVADYNLDQITAIADSPGHVFAVENGFKALRSTIDALTSKVCLDVTSVEPSSECVGEPYHVVIHGNGFQNLKKRDEVICRFIFNESTIIDEKPTSIDNNSMNCPGPKLEKPGEEYSIEVSLNKGKTFFKSNVSITSTTCVSTSMGLQTCMRTVQSLCTRRSTEKADRSQAVPESSVCSRHLRLLQPGFWMVQ

SEQ ID NO: 1709 - protein, 186 aa, Homo sapiens
MRPLPSGRRKTRGISLGLFALCLAAARCLQSQGVSLYIPQATINATVKEDILLSVEYSCHGVPTIEWTYSSNWGTQKIVEWKPGTQANISQSHKDRVCTFDNGSIQLFSVGVRDSGYYVITVTERLGSSQFGTIVLHVSEILYEDLHFVAVILAFLAAVAAVLISLMWVCNKCAYKFQRKRRHKLK

SEQ ID NO: 1710 - protein, 210 aa, Homo sapiens
IFLTLLSFSYVAKALAGIFMKISTTQIERRFEISSSLVGLIDGSFEIGCVKESGSHMWIYVFMGNMLRGIGETPIVPLGISYIDDFAKEGHSSLYLGTVNVMGMTGLVFAFMLGSLFAKMYVDIGYVDLSTIRITPKDSRWVGAWWLGFLVSGIVSIISSIPFFFLPLNPNKPQKERKVSLFLHVLKTNDKRNQIANLTNRRKYITKNVT

SEQ ID NO: 1711 - protein, 114 aa, Homo sapiens
MAGTVLGVGAGVFILALLWVAVLLLCVLLSRASGAARFSVIFLFFGAVIITSVLLLFPRAGEFPAPEVEVKIVDDFFIGRYVLLAFLSAIFLGGLFLVLIHYVLEPIYAKPLHS

SEQ ID NO: 1712 - protein, 290 aa, Homo sapiens
MEQRNRLGALGYLPPLLLHALLLFVADAAFTEVPKDVTVREGDDIEMPCAFRASGATSYSLEIQWWYLKEPPRELLHELALSVPGARSKVWELPSPASNPALLQTVRVQGNDISHRLRLSAVRLQDEGVYECRVSDYSDDDTQEHKAQAMLRVLSRFAPPNMQAAEAVSHIQSSGPRRHGPASAANANNAGAASRTTSEPGRGDKSPPPGSPPAAIDPAVPEAAAASAAHTPTTTVAAAAAASSASPPSGQAVLLRQRHGSGTGRSYTTDPLLSLLLLALHKFLRLLLGH

SEQ ID NO: 1713 - protein, 330 aa, Homo sapiens
MDPTTPAWGTESTTVNGNDQALLLLCGKETLIPVFLILFIALVGLVGNGFVLWLLGFRMRRNAFSVYVLSLAGADFLFLCFQIINCLVYLSNFFCSISINFPSFFTTVMTCAYLAGLSMLSTVSTERCLSVLWPIWYRCRRPRHLSAVVCVLLWALSLLLSILEGKFCGFLFSDGDSGWCQTFDFITAAWLIFLFMVLCGSSLALLVRILCGSRGLPLTRLYLTILLTVLVFLLCGLPFGIQWFLILWIWKDSDVLFCHIHPVSVVLSSLNSSANPIIYFFVGSFRKQWRLQQPILKLALQRALQDIAEVDHSEGCFRQGTPEMSRSSLV

SEQ ID NO: 1714 - protein, 157 aa, Homo sapiens
MAGRRLNLRWALSVLCVLLMAETVSGTRGSSTGAHISPQFPASGVNQTPVVDVSIPCRKVCGLNVSDRCDFIRTNPDCHSDGGYLDYLEGIFCHFPPSLLPLAVTLYVRPCPGGLVSWLLYLFLILGVTAAKFALVAFSDPHTAGLALGALFGESSP

SEQ ID NO: 1715 - protein, 36 aa, Homo sapiens
MIPLYPSFNFNKSHFAFQILPIATNILFFSGVAELI

SEQ ID NO: 1716 - protein, 178 aa, Homo sapiens
MQSVGLLLSLLGWILSIITTYLPHWKNLNLDLNEMENWTMGLWQTCVIQEEVGMQCKDFDSFLALPAELRVSRILMFLSNGLGFLGLLVSGFGLDCLRIGESQRDLKRRLLILGGILSWASGITALVPVSWVAHKTVQEFWDENVPDFVPRWEFGEALFLGWFAGLSLLLGGCLLNCA

SEQ ID NO: 1717 - protein, 55 aa, Homo sapiens
MILAVGLSVCGFYCVEACSFYIQLSFYHEGMLNFTEYFFGIYRNGHMVMSFILLM

SEQ ID NO: 1718 - protein, 624 aa, Homo sapiens
CSHYRSKIHLKAGDKLQSPEGKPKTGRIQEKCEGPCISSSNCSQPCAKDFHGEIGFTCNQKKWQKSAETCTSLSVEKLFKDSTGASRLSVAAPSIPLHILDFRAPETIESVAQGIRKNCPFDYACITDMVKSSETTSGNIAFIVELLKNISTDLSDNVTREKMKSYSEVANHILDTAAISNWAFIPNKNASSDLLQSVNLFARQLHIHNNSENIVNELFIQTKGFHINHNTSEKSLNFSMSMNNTTEDILGMVQIPRQELRKLWPNASQAISIAFPTLGAILREAHLQNVSLPRQVNGLVLSVVLPERLQEIILTFEKINKTRNARAQCVGWHSKKRRWDEKACQMMLDIRNEVKCRCNYTSVVMSFSILMSSKSMTDKVLDYITCIGLSVSILSLVLCLIIEATVWSRVVVTEISYMRHVCIVNIAVSLLTANVWFIIGSHFNIKAQDYNMCVAVTFFSHFFYLSLFFWMLFKALLIIYGILVIFRRMMKSRMMVIGFAIGYGCPLIIAVTTVAITEPEKGYMRPEACWLNWDNTKALLAFAIPAFVIVAVNLIVVLVVAVNTQRPSIGSSKSQDVVIIMRISKNVAILTPLLGLTWGFGIATLIEGTSLTFHIIFALLNAFQ

SEQ ID NO: 1719 - protein, 349 aa, Homo sapiens
MLIFFLVSVALELLCFLLHLLVRCSGFVLFYTTRPRDSRRGRPGLGRGSGYRVHHDVVAGDVHFHRGTAPTGSPAQTAPARRCPIPPSLGRQLSLGGWGALWWQQHCTDPQGQGRQLYRPGDTCRVRSGVPGHAEAGRGSHWSSFLRVQNQNGLDAGLDPEHPAPALAPNGSPKDSPAHEVTGSGGAYMCFDVLWPRVQRSWPTFRAVLLHRYVVAGVIWADMLSIAVTYFITLCLFPDLESEICHCILGEWLPILIMAVFNLSDFVGKILVALPVYWRGTHLLACSCLRVVFIPLFTLCVYPSGMPALRHPAWPCIFSLLMGISNGSFGSVPMILAAGKVSPKQREPA

SEQ ID NO: 1720 - protein, 337 aa, Homo sapiens
MNSWDAGLAGLLVGTMGVSLLSNALVLLCLLHSADIRRQAPALFTLNLTCGNLLCTVVNMPLTLAGVVAQRQPAGDRLCRLAAFLDTFLAANSMLSMAALSIDRWVAVVFPLSYRAKMRLRDAALMVAYTWLHALTFPAAALALSWLGFHQLYASCTLCSRRPDERLRFAVFTGAFHALSFLLSFVVLCCTYLKVLKVARFHCKRIDVITMQTLVLLVDLHPSVRERCLEEQKRRRQRATKKISTFIGTFLVCFAPYVITRLVELFSTVPIGSHWGVLSKCLAYSKAASDPFVYSLLRHQYRKSCKEILNRLLHRRSIHSSGLTGDSHSQNILPVSE

SEQ ID NO: 1721 - protein, 213 aa, Homo sapiens
SHGWTSQAKFSVYIKSIKPDEVACLKINVMAAIAAFVALMLVFERVCLLDQVNFYSGIIENKGTPSSCQLSSETRVSLSFSSGPLSTEPSTWTSKWKHPKDPHPFPPLDAWFGYHPYTKLGYAGNTEPQFIIPSCIAIRESAKVVDQAQRRVLRGVDDLDFFIGDEAIDKPTYATKWPIRHGIIEDWDLMERFMEQVVFKYLRAEPEDHYFLM

SEQ ID NO: 1722 - protein, 203 aa, Homo sapiens
VNILQFIFIALRLDKIIHWPWLVVCVPLWILMSFLCLVVLYYIVWSVLFLRSMDVIAEQRRTHITMALSWMTIVVPLLTFEILLVHKLDGHNAFSCIPIFVPLWLSLITLMATTFGQKGGNHWWFGIRKDFCQFLLEIFPFLREYGNISYDLHHEDNEETEETPVPEPPKIAPMFRKKARVVITQSPGKYVLPPPKLNIEMPD

SEQ ID NO: 1723 - protein, 324 aa, Homo sapiens
LLTGLLSHVLMEVKKIPVEEGLCTTIPCAFEFPKEPPSNSMIMHYWLNKNISSLVATNKPNATIGDNTKDKFYMTGNLDEEDCTLLIHDILKGNSIIYLFYADLGEQKKLTQKPELHMPEILLAEKTVTLNCTLKGTCKETKALFHSRKNPAISSSSSSVLHFTLRPEDHGNTLGCHLNLSLANVTRSSLVKLQVVSPARLFNSSCSLEKTVLCSCSFHGIPTPSVQWWMGGVPVAVNSMDNILRVTSSTCAPWANSTISLIGEPERVMRLHCEGKNQYGIHTSSIFLIPTEYPGTYVFVKGLIQGIVYGAIAFSLLFFCLILL

SEQ ID NO: 1724 - protein, 230 aa, Homo sapiens
MFVPHKENGHMLKFLEVKFGLNMTNGKSLKETVTLEDGRIGERPEIIYHVIHTILLGSLAMVIEGLKYIWIPYVCMLAAFGVCSPELWMTLFKWLRLRTVHPILLFFPRLMTELMELQEFYDPDTVELMTWIKRQAPVAAVFAGSPQLMGAIKLCTGWMVTSLPLYNDDDLLKRNENIYQIYSKRSAEDIYKILTSYKANYLIVEDAICNEVGPMRGCRVKDLLDIANGH

SEQ ID NO: 1725 - protein, 158 aa, Homo sapiens
TFSAAMTTMQGMEQTTPGAGPDVPQLGNIDVIHSYLCKGLQEKFFKRKPKVLGVVRILIALMSLSMGIIMMCVAFSSYEEHPIFVYVAYTIWGSVMYKYQYQEPAVGGSLGKNITSSVLAISGILINAISLTFYSFRYHYCNHDQLSSNCYMTMSILM

SEQ ID NO: 1726 - protein, 247 aa, Homo sapiens
TKNVTKALTTYVVSASISDDMFIQNLADPVVITLQHIGGNQNYGQVHCAFWDFENNNGLGGWNSSGCKVKETNVNYTICQCDHLTHFGVLMDLSRSTVDSVNEQILALITYTGCGISSIFLGVAVVTYIAFHKLRKDYPAKILINLCTALLMLNLVFLINSWLSSFQKVGVCITAAVALHYFLLVSFTWMGLEAVHMYLALVKVFNIYIPNYILKFCLVGWGIPAIMVAITVSVKKDLYGTLSPTTP

SEQ ID NO: 1727 - protein, 213 aa, Homo sapiens
LPSQEASKLYHEHYMRNSRAIGVLWAIFTICFAIINVVVFIQPYWVGDSVSTPKPGYFGLFHYCVGSGLAGRELTCRGSFTDFSTIPSSAFKAAAFFVLLSMVLILGCITCFSLFFFCNTATVYKICAWMQLLAALCLVLGCMIFPDGWDAETIRDMCGAKTGKYSLGDCSVRWAYILAIIGILNALILSFLAFVLGNRQTDLLQEELKPENK

SEQ ID NO: 1728 - protein, 170 aa, Homo sapiens
GENGYTAAESKAHPGGEAGGGHLCCSRRGACLSASLLLLLATVAALIALVTILGLPSCTPGAQACITLTNRTGFLCHDQRSCIPASGVCDGVRTCTHGEDEDESLCRDVPQSLPHFLVAHCGDPASWIYSDQKCDGTNNCGDCSDELSPGRGLGTGWAGAGVQAAARGQR

SEQ ID NO: 1729 - protein, 459 aa, Homo sapiens
WVGGEAAGVRPPRQPPCNRQSEVQSVGPGPRVGPWGVGAAPGELQGSPLPGVEGAGGAEDILGDLGSVRIMESISMMGSPKSLSETFLPNGINGIKDARKVTVGVIGSGDFAKSLTIRLIRCGYHVVIGSRNPKFASEFFPHVVDVTHHEDALTKTNIIFVAIHREHYTSLWDLRHLLVGKILIDVSNNMRINQYPESNAEYLASLFPDSLIVKGFNVVSAWALQLGPKDASRQVYICSNNIQARQQVIELARQLNFIPIDLGSLSSAREIENLPLRLFTLWRGPVVVAISLATFFFLYSFVRDVIHPYARNQQSDFYKIPIEIVNKTLPIVAITLLSLVYLAGLLAAAYQLYYGTKYRRFPPWLETWLQCRKQLGLLSFFFAMVHVAYSLCLPMRRSERYLFLNMAYQQSTLGYVALLISTFHVLIYGWKRAFEEEYYRFYTPPNFVLALVLPSIVIL

SEQ ID NO: 1730 - protein, 457 aa, Homo sapiens
MVSKDASVKEYIFKELQKYLPSHAVPDELVLIDSLPFTSHGKIDVSELNKIYLNYINLKSENKLSGKEDLWEKLQYLWKSTLNLPEDLLRVPDESLFLNSGGDSLKSIRLLSEIEKLVGTSVPGLLEIILSSSILEIYNHILQTVVPDEDVTFRKSCATKRKLSDINQEEASGTSLHQKAIMTFTCHNEINAFVVLSRGSQILSLNSTRFLTKLGHCSSACPSDSVSQTNIQNLKGLNSPVLIGKSKDPSCVAKVSEEGKPAIGTQKMELHVRWRSDTGKCVDASPLVVIPTFDKSSTTVYIGSHSHRMKAVDFYSGKVKWEQILGDRIESSACVSKCGNFIVVEKEVCLEVKMWRNCLFLSVFEPDSTSFVFCYIGRTFTGCKSCYWERYLETFLWKTTLLFPTMLLTVYLYWLCRWEFTLLYSLWRTGLAVLYQWTNLFIPVYLTIRAKNIFWFP

SEQ ID NO: 1731 - protein, 101 aa, Homo sapiens
MEGCLRIEEALTLGGACLFAGLAFLWAAFAQHFSAADSPGTEFTPATTTSRLLHVLYVCSCSLVAEKDDFSSPHSHSLLLVSLPEPHFELSEGLRLAFRGS

SEQ ID NO: 1732 - protein, 339 aa, Homo sapiens
MACEPQVDPGATGPLPPSSPGWSALPGGSPPGWGQDLLAADQWLTGPCTVVQGDLDPFVQFLYLELQAELHNGQVLTVLRIDNTCAPISFDLGAAEEQLQTWGIQVFYVVVWANIYSTSQMFALGNHWAGMLLVTLAAVSLTLTLVLVFERHQKKANTNTDLRLAAANGALLRHRVLLGVTDTVEGCQSVIQLWFVYFDLENCVQFLSDHVQEMKTSQESLLRSRLSQLCVVMETGVSPATAEGPENLEDAPLLPGNSCPNERPLMQTELHQLVPEAEPEEMARQLLAVFGGYYIRLLVTSQLPQAMGTRHTNSPRIPCPCQLIEAYILGTGCCPFLAR

SEQ ID NO: 1733 - protein, 431 aa, Homo sapiens
MEGVGGLWPWVLGLLSLPGVILGAPLASSCAGACGTSFPDGLTPEGTQASGDKDIPAINQGLILEETPESSFLIEGDIIRPSPFRLLSATSNKWPMGGSGVVEVPFLLSSKYDEPSRQVILEALAEFERSTCIRFVTYQDQRDFISIIPMYGCFSSVGRSGGMQVVSLAPTCLQKGRGIVLHELMHVLGFWHEHTRADRDRYIRVNWNEILPGFEINFIKSQSSNMLTPYDYSSVMHYGRLAFSRRGLPTITPLWAPSVHIGQRWNLSASDITRVLKLYGCSPSGPRPRGRGSHAHSTGRSPAPASLSLQRLLEALSAESRSPDPSGSSAGGQPVPAGPGESPHGWESPALKKLSAEASARQPQTLASSPRSRPGAGAPGVAQEQSWLAGVSTKPTVPSSEAGIQPVPVQGSPALPGGCVPRNHFKGMSED

SEQ ID NO: 1734 - protein, 76 aa, Homo sapiens
VLHETFSQHTFLMNGLIQGVKGLLSFLSAPLIGALSDVWGRKPFLLGTVFFTCFPIPLMRISPCRAWWCALVISAT

SEQ ID NO: 1735 - protein, 416 aa, Homo sapiens
MSDERRLPGSAVGWLVCGGLSLLANAWGILSVGAKQKKWKPLEFLLCTLAATHMLNVAVPIATYSVVQLRRQRPDFEWNEGLCKVFVSTFYTLTLATCFSVTSLSYHRMWMVCWPVNYRLSNAKKQAVHTVMGIWMVSFILSALPAVGWHDTSERFYTHGCRFIVAEIGLGFGVCFLLLVGGSVAMGVICTAIALFQTLAVQVGRQADRRAFTVPTIVVEDAQGKRRSSIDGSEPAKTSLQTTGLVTTIVFIYDCLMGFPVLGPFSLADTHLSDLPYTWGDRDSGGACVMVVSFSSLRADASAPWMALCVLWCSVAQALLLPVFLWACDRYRADLKAVREKCMALMANDEESDDETSLEGGISPDLVLERSLDYGYGGDFVALDRMAKYEISALEGGLPQLYPLRPLQEDKMQYLQ

SEQ ID NO: 1736 - protein, 305 aa, Homo sapiens
MEQVNKTVVREFVVLGFSSLARLQQLLFVIFLLLYLFTLGTNAIIISTIVLDRALHTPMYFFLAILSCSEICYTFVIVPKMLVDLLSQKKTISFLGCAIQMFSFLFFGSSHSFLLAAMGYDRYMAICNPLRYSVLMGHGVCMGLMAAACACGFTVSLVTTSLVFHLPFHSSNQLHHFFCDISPVLKLASQHSGFSQLVIFMLGVFALVIPLLLILVSYIRIISAILKIPSSVGRYKTFSTCASHLIVVTVHYSCASFIYLRPKTNYTSSQDTLISVSYTILTPLFNPMIYSLRNKEFKSALRRTI

SEQ ID NO: 1737 - protein, 301 aa, Homo sapiens
RMKRKNFTEVSEFIFLGFSSFGKHQITLFVVFLTVYILTLVANIIIVTIICIDHHLHTPMYFFLSMLASSETVYTLVIVPRMLLSLIFHNQPISLAGCATQMFFFVILATNNCFLLTAMGYDRYVAICRPLRYTVIMSKGLCAQLVCGSFGIGLTMAVLHVTAMFNLPFCGTVVDHFFCDIYPVMKLSCIDTTINEIINYGVSSFVIFVPIGLIFISYVLVISSILQIASAEGRKKTFATCVSHLTVVIVHCGCASIAYLKPKSESSIEKDLVLSVTYTIITPLLNPVVYSLRNKEVKDAL

SEQ ID NO: 1738 - protein, 167 aa, Homo sapiens
METIMDDEVTKRFSAEELESWNLLSRTNYNFQYISLRLTVLWGLGVLIRYCFLLPLRIALAFTGISLLVVGTTVVGYLPNGRFKEFMSKHVHLMCYRICVRALTAIITYHDRENRPRNGGICVANHTSPIDVIILASDGYYAMVGQVHGGLMGVIQRAMVKACPHVW

SEQ ID NO: 1739 - protein, 837 aa, Homo sapiens
MSQTGSHPGRGLAGRWLWGAQPCLLLPIVPLSWLVWLLLLLLASLLPSARLASPLPREEEIVFPEKLNGSVLPGSGAPARLLCRLQAFGETLLLELEQDSGVQVEGLTVQYLGQAPELLGGAEPGTYLTGTINGDPESVASLHWDGGALLGVLQYRGAELHLQPLEGGTPNSAGGPGAHILRRKSPASGQGPMCNVKAPLGSPSPRPRRAKRFASLSRFVETLVVADDKMAAFHGAGLKRYLLTVMAAAAKAFKHPSIRNPVSLVVTRLVILGSGEEGPQVGPSAAQTLRSFCAWQRGLNTPEDSDPDHFDTAILFTRQDLCGVSTCDTLGMADVGTVCDPARSCAIVEDDGLQSAFTAAHELGHVFNMLHDNSKPCISLNGPLSTSRHVMAPVMAHVDPEEPWSPCSARFITDFLDNGYGHCLLDKPEAPLHLPVTFPGKDYDADRQCQLTFGPDSRHCPQLPPPCAALWCSGHLNGHAMCQTKHSPWADGTPCGPAQACMGGRCLHMDQLQDFNIPQAGGWGPWGPWGDCSRTCGGGVQFSSRDCTRPVPRNGGKYCEGRRTRFRSCNTEDCPTGSALTFREEQCAAYNHRTDLFKSFPGPMDWVPRYTGVAPQDQCKLTCQAQALGYYYVLEPRVVDGTPCSPDSSSVCVQGRCIHAGCDRIIGSKKKFDKCMVCGGDGSGCSKQSGSFRKFRYGYNNVVTIPAGATHILVRQQGNPGHRSIYLALKLPDGSYALNGEYTLMPSPTDVVLPGAVSLRYSGATAASETLSGHGPLAQPLTLQVLVAGNPQDTRLRYSFFVPRPTPSTPRPTPQDWLHRRAQILEILRRRPWAGRK

SEQ ID NO: 1740 - protein, 357 aa, Homo sapiens
MRPPPALALAGLCLLALPAAAASYFGLTGREVLTPFPGLGTAAAPAQGGAHLKQCDLLKLSRRQKQLCRREPGLAETLRDAAHLGLLECQFQFRHERWNCSLEGRMGLLKRGFKETAFLYAVSSAALTHTLARACSAGRMERCTCDDSPGLESRQAWQWGVCGDNLKYSTKFLSNFLGSKRGNKDLRARADAHNTHVGIKAVKSGLRTTCKCHGVSGSCAVRTCWKQLSPFRETGQVLKLRYDSAVKVSSATNEALGRLELWAPARQGSLTKGLAPRSGDLVYMEDSPSFCRPSKYSPGTAGRVCSREASCSSLCCGRGYDTQSRLVAFSCHCQVQWCCYVECQQCVQEELVYTCKH

SEQ ID NO: 1741 - protein, 277 aa, Homo sapiens
VAMAALVWLLAGASMSSLNKWIFTVHGFGRPLLLSALHMLVAALACHRGARRPMPGGTRCRVLLLSLTFGTSMACGNVGLRAVPLDLAQLVTTTTPLFTLALSALLLGRRHHPLQLAAMGPLCLGAACSLAGEFRTPPTGCGFLLAATCLRGLKSVQQSALLQEERLDAVTLLYATSLPSFCLLAGAALVLEAGVAPPPTAGDSRLWACILLSCLLSVLYNLASFSLLALTSALTVHVLGNLTVVGNLILSRLLFGSRLSALSYVGIALTLSGMFLY

SEQ ID NO: 1742 - protein, 350 aa, Homo sapiens
LSSSASLLACGICQASGQIFITQTLGIKGYRTVVALDKVPEDVQEYSWYWGANDSAGNMIISHKPPSAQQPGPMYTGRERVNREGSLLIRPTALNDTGNYTVRVVAGNETQRATGWLEVLELGSNLGISVNASSLVENMDSVAADCLTNVTNITWYVNDVPTSSSDRMTISPDGKTLVILRVSRYDRTIQCMIESFPEIFQRSERISLTVAYGPDYVLLRSNPDDFNGIVTAEIGSQVEMECICYSFLDLKYHWIHNGSLLNFSDAKMNLSSLAWEQMGRYRCTVENPVTQLIMYMDVRIQAPHECPLPSGILPVVHRDFSISGSMVMFLIMLTVLGGVYICGVLIHALI

SEQ ID NO: 1743 - protein, 522 aa, Homo sapiens
PLPQLSVQPKAPETEEGAAELRLRCLGWGPGRGELSWSRDGRALEAAESEGAETPRMRSEGDQLLIVRPVRSDHARYTCRVRSPFGHREAAADVSVFYGPDPPTITVSSDRDAAPARFVTAGSNVTLRCAAASRPPADITWSLADPAEAAVPAGSRLLLPAVGPGHAGTYACLAANPRTGRRRRSLLNLTVADLPPGAPQCSVEGGPGDRSLRFRCSWPGGAPAASLQFQGLPEGIRAGPVSSVLLAAVPAHPRLSGVPITCLARHLVATRTCTVTPEAPREVLLHPLVAETRLGEAEVALEASGCPPPSRASWAREGRPLAPGGGSRLRLSQDGRKLHIGNFSLDWDLGNYSVLCSGALGAGGDQITLIDGPALGRTSTYRDWVSLLILGPQERSAVVPLPPRNPGTWTFRILPILGGQPGTPSQSRVYRAGPTLSHGAIAGIVLGSLLGLALLAVLLLLCICCLCRFRGKTPEKKKHPSTLVPVVTPSEKKMHSVTPVEISWPLDLKVPLEDHSSTRAYQ

SEQ ID NO: 1744 - protein, 394 aa, Homo sapiens
SSGQKFSQDDFPLGPVSISHGGQYRCSVDTTSPLGGQPPVTPLDILIAGFYSKPTLSALPSPVVASGGKVTLRCGSQKGYHHFVLMKEGEHQLPRTLDSQQLHSGGFQALFPVGPVTPSHRWRFTCYYYYMNTPQVWSHPSDPLEILPSETLTLQCGSDVGYDRFTLYKEGECDFLQRPGQQPQAGLSQANFTLGPVRGSHGGQYRCYGAHNLSSEWSAPSDPLDILIAGQIPGRPSLSVQLWPTVASGENVTLLCQSQEWMHTFLLTKEGAAHPLLCLRSKYGAHKYQAEFPMSPVTSAHTGTYRCYGSLSSDPYLLSHPSGPVELVVSASHLQDYAVENLIHMGVAGLILVVLGILSFEAWHSQRSFPRCSREVNSREDNVLYRVVKPQEQI

SEQ ID NO: 1745 - protein, 309 aa, Homo sapiens
LKVESSMFCPLKLILLPVLLDYSLGLNDLNVSPPELTVHVGDSALMGCVFQSTEDKCIFKIDWTLSPGEHAKDEYVLYYYSNLSVPIGRFQNRVHLMGDILCNDGSLLLQDVQEADQGTYICEIRLKGESQVFKKAVVLHVLPEEPKELMVHVGGLIQMGCVFQSTEVKHVTKVEWIFSGRRAKEEIVFRYYHKLRMSVEYSQSWGHFQNRVNLVGDIFRNDGSIMLQGVRESDGGNYTCSIHLGNLVFKKTIVLHVSPEEPRTLVTPAALRPLVLGGNQLVIIVGIVCATILLLPVLILIVKKTCGNK

SEQ ID NO: 1746 - protein, 264 aa, Homo sapiens
MVFTQAPAEIMGHLRIRSLLARQCLAEFLGVFVLMLLTQGAVAQAVTSGETKGNFFTMFLAGSLAVTIAIYVGGNVSGAHLNPAFSLAMCIVGRLPWVKLPIYILVQLLSAFCASGATYVLYHDALQNYTGGNLTVTGPKETASIFATYPAPYLSLNNGFLDQVLGTGMLIVGLLAILDRRNKGVPAGLEPVVVGMLILALGLSMGANCGIPLNPARDLGPRLFTYVAGWGPEVFRWETDSPGAGLHSPSSAKGSVPGSTALCL

SEQ ID NO: 1747 - protein, 313 aa, Homo sapiens
MAPRTLLLLLLGALALTETWAGSHSLRYFSTAVSQPGRGEPRFIAVGYVDDTEFVRFDSDSVSPRMERRAPWVEQEGLEYWDQETRNAKGHAQIYRVNLRTLLRYYNQSEAEEAWLRRGPDRRLLRRYEQFAYDGKDYIALNEDLHSWTAANTAAQISQHKWEADKYSEQAHVTQHPISDHEATLRCWALGLYPAEITLTWQQDGEDQTQDTELVETRPAGDGTFQKWVAVVVPSGEEQRYMCHVQHEGLPEPLTLRWEPSSQPTIPIVGIVAGLFLLGAVVTGAVVAAAMWRKKSSGSNCAQYSDASHDTCK

SEQ ID NO: 1748 - protein, 498 aa, Homo sapiens
MATDLPIMARGPARSAAPAGGSSSGCGARQGRAGGGVLAMAGLSDLELRRELQALGFQPGPITDTTRDVYRNKLRRLRGEARLRDEERLREEARPRGEERLREEARLREDAPLRARPAAASPRAEPWLSQPASGSAYATPGAYGDIRPSAASWVGSRGLAYPARPAQLRRRASVRGSSEEDEDARTPDRATQGPGLAARRWWAASPAPARLPSSLLGPDPRPGLRATRAGPAGAARARPEVGRRLERWLSRLLLWASLGLLLVFLGILWVKMGKPSAPQEAEDNMKLLPVDCERKTDEFCQAKQKAALLELLHELYNFLAIQAGNFECGNPENLKSKCIPVMEAQEYIANVTSSSSAKFEAALTWILSSNKDVGIWLKGEDQSELVTTVDKVVCLESAHPRMGVGCRLSRALLTAVTNVLIFFWWIPVWTSFEQEAQQGLGLLLLPEKYKHLLESYRYLMKARRTQGAALKGGHQSYPLTSGAAFEQRPQGVSEGERP

SEQ ID NO: 1749 - protein, 572 aa, Homo sapiens
CAYVIILMAIYWCTEVIPLAVTSLMPVLLFPLFQILDSRQVCVQYMKDTNMLFLGGLIVAVAVERWNLHKRIALRTLLWVGAKPARLMLGFMGVTALLSMWISNTATTAMMVPIVEAILQQMEATSAATEAGLELVDKGKAKELPGEPLARALPGHNSSLPLPLLANALATSFSLSASRSPPLNTHREKKIENTVVLSPTLGQQEDQERKRLCKAMTLCICYAASIGGTATLTGTGPNVVLLGQMNELFPDSKDLVNFASWFAFAFPNMLVMLLFAWLWLQFVYMRFNFKKSWGCGLESKKNEKAALKVLQEEYRKLGPLSFAEINVLICFFLLVILWFSRDPGFMPGWLTVAWVEGETKYVSDATVAIFVATLLFIVPSQKPKFNFRSQTEEERKTPFYPPPLLDWKVTQEKVPWGIVLLLGGGFALAKGSEASGLSVWMGKQMEPLHAVPPAAITLILSLLVAVFTECTSNVATTTLFLPIFASMSRSIGLNPLYIMLPCTLSASFAFMLPVATPPNAIVFTYGHLKVADMVKTGVIMNIIGVFCVFLAVNTWGRAIFDLDHFPDWANVT

SEQ ID NO: 1750 - protein, 260 aa, Homo sapiens
QVRLQTQTTYRGIVDCMVKIYRHESLLGFFKGMSFPIASIAVVNSVLFGVYSNTLLVLTATSHQERRAQPPSYMHIFLAGCTGGFLQAYCLAPFDLIKVRLQNQTEPRAQPGSPPPRYQGPVHCAASIFREEGPRGLFRGAWALTLRDTPTVGIYFITYEGLCRQYTPEGQNPSSATVLVAGGFAGIASWVAATPLDVIKSRMQMDGLRRRVYQGMLDCMVSSIRQEGLGVFFRGVTINSARAFPVNAVTFLSYEYLLRW

SEQ ID NO: 1751 - protein, 218 aa, Homo sapiens
WKQTSVRDDRGIPGPLLTLTVQWEVIGVPAGAASPCGCSGPLKAQLGLLKAAPPDQAPPGQGEGRKKDSALLSKRRKCGKYGITSLLANGVYAAAYPLHDGDYNGENVEFNDRKLLYEEWARYGVFYKYQPIDLVRKYFGEKIGLYFAWLGVYTQMLIPASIVGIIVFLYGCATMDENIPSSWDLAPGSPVLSKAEACTERDPSSLAGPPGFPSEPTG

SEQ ID NO: 1752 - protein, 206 aa, Homo sapiens
MERVAEAYGKGSQGSARECHHPSWGMQGKVPGGSFPGKPKKRPTKTESTFGYLWYPEAAMPTTTTLEEEDLLRIDSLISSSFMAPALGNQHGGEIMKLEYNHLQTSQPPPVDTKGILGSHFISHLSKKSYRSISSRGQESPEEFKGLWQEKSRGCVQELAPLVIVLRSPCVLDADEIAAKCLCSLGKALYFSGSPFLSLFFFFFFF

SEQ ID NO: 1753 - protein, 180 aa, Homo sapiens
STIHESYGRPEEQVLINRQEITNKADAWDMQEFITHMYIKQLLRHPAFQLLLALLLVINAITIALRTNSYLDQKHYELFSTIDDIVLTILLCEVLLGWLNGFWIFWKDGWNILNFIIVFILLLRFFINEINIPSINYTLRALRLVHVCMAVEPLARIIRVILQSVPDMANIMVLILFFML

SEQ ID NO: 1754 - protein, 340 aa, Homo sapiens
MGAVVHLFSSALLDPGLIGALGVLVLNSLLKVYFFVGCANDPQRRPEKERLRAQWASLETVHLAGLALFLTVVGSRVAALVVLEFSLRAVSTLLSLGKGSQGAAERLQLYLLCQYSLGCGLTCGLSFLQEGAPHRTLNLLLSLGLATLLGLGARRLHRHVCRLYELHSSQRYCGVCLGLLAHAHGLPQLLGRALAIAFAVGDLAAVALINQDFLTTSEAMRFWTPLTICYTLLVIYMQEEQRQHPGLQSQVQTVLVRMGGLFVLLLTVGRWLDLLGILVSLLGELWCLVGVRTLLDLCQIQEVWHLPIGDIDTRAAAGQDESLHPGAVVAVEQVAWGAGG

SEQ ID NO: 1755 - protein, 316 aa, Homo sapiens
AVPRQGSLREPLPSRRGRRGPPGHAPPSPSLRRRGARALQPSAAARARARVPRGLRLHRPAHRGLPRGLPSVPDPFPLDVRKLLVAGNRIQRIPEDFFIFYGDLVYLDFRNNSLRSLEEGTFSGSAKLVFLDLSYNNLTQLGAGAFRSAGRLVKLSLANNNLVGVHEDAFETLESLQVLELNDNNLRSLSVAALAALPALRSLRLDGNPWLCDCDFAHLFSWIQENASKLPKGLDEIQCSLPMESRRISLRELSEASFSECRFSLSLTDLCIIIFSGVAVSIAAIISSFFLATVVQCLQRCAPNKDAEDEDEDKDD

SEQ ID NO: 1756 - protein, 176 aa, Homo sapiens
PSGPLFAFTPLTQFPAYGISCGVDLNPQRARIFHALERMKTQDGWWPNLLKVKKKWLLPAICSFFCLLSVVMTGCFLWQYHLPKLKTGSLGPEETSAPVRMCPRHPEPVPLAHPLPVLKEALEKVDQILRQAMSAPGVAAMSAVVIHNDTVLWTGNFGKKNGSDPASGAPNEYTMY

SEQ ID NO: 1757 - protein, 390 aa, Homo sapiens
HFLLPPLSKKSLLPPTMILRPYQPCGTVKEFDTNFTYVQQSEFYLEPNIKYVFQVRCQETGKRYWQPWSSLFFHKTPETVPQVTSKAFQHDTWNSGLTVASISTGHLTSDNRGDIGLLLGMIVFAVMLSILSLIGIFNRSFRTGIKRRILLLIPKWLYEDIPNMKNSNVVKMLQENSELMNNNSSEQVLYVDPMITEIKEIFIPEHKPTDYKKENTGPLETRDYPQNSLFDNTTVVYIPDLNTGYKPQISNFLPEGSHLSNNNEITSLTLKPPVDSLDSGNNPRLQKHPNFAFSVSSVNSLSNTIFLGELSLILNQGECSSPDIQNSVEEETTMLLENDSPSETIPEQTLLPDEFVSCLGIVNEELPSINTYFPQNILESHFNRISLLEK

SEQ ID NO: 1758 - protein, 504 aa, Homo sapiens
MLRLVAACPESCVVCTKDVTLCHQLTYIVAAPMTTRVLIITDGYLSSIESTNLSLLFNLALLSLSRNGIEDVQEDALHGLTMLRTLLLEHNQISSSSLTDHTFSKLHSLQVLVLSNNALRTLRGSWFRNTSGLTRLQLDGNQITNLTDSSFGGTNLHSLRYLDLSNNFISYIGKDAFRPLPQLQEVDLSRNRLAHMPDVFTPLKQLILLSLDKNQWSCTCDLHPLARFLRNYIKSSAHTLRNAKDLNCQPSTAAVAAAQSVLRLSETNCDSKAPNFTLVLKDRSPLLPGPDVALLTVLGFAGAVGLTCLGLVVFNWKLHQGKANEHTSENLCCRTFDEPLCAHEARNYHTKGYCNCHLTQENEIKVMSTVGSRKEMPLLQENSHQATSASESATLDGSFRNLKKKDRGVGSTLFCQDGRLLHSECSEPPGNMRAFNEAGLLTTYNPRKVQKLWNLEPGEVQPQTLQHHIIRTEDISSDIFRRRYATPASALAGESLEKRLTNES

SEQ ID NO: 1759 - protein, 450 aa, Homo sapiens
QCLGPQLPLPPPTPSHPPLRPHGIPSPDGGNTEPRDMRVGGAFHLLLVCLSPALLSAVRINGDGQEVLYLAEGDNVRLGCPYVLDPEDYGPNGLDIEWMQVNSDPAHHRENVFLSYQDKRINHGSLPHLQQRVRFAASDPSQYDASINLMNLQVSDTATYECRVKKTTMATRKVIVTVQARPAVPMCWTEGHMTYGNDVVLKCYASGGSQPLSYKWAKISGHHYPYRAGSYTSQHSYHSELSYQESFHSSINQGLNNGDLVLKDISRADDGLYQCTVANNVGYSVCVVEVKVSDSRRIGVIIGIVLGSLLALGCLAVGIWGLVCCCCGGSGAGGARGAFGYGNGGGVGGGACGDLASEIREDAVAPGCKASGRGSRVTHLLGYPTQNVSRSLRRKYAPPPCGGPEDVALAPCTAAAACEAGPSPVYVKVKSAEPADCAEGPVQCKNGLLV

SEQ ID NO: 1760 - protein, 452 aa, Homo sapiens
EEDALLENGSQSNESDDVSTDRGPAPPSPLKETSFSIGLQVLFPFLLAGFGTVAAGMVLDIVQHWEVFQKVTEVFILVPALLGLKGNLEMTLASRLSTAANIGHMDTPKELWRMITGNMALIQVQATVVGFLASIAAVVFGWIPDGHFSIPHAFLLCASSVATAFIASLVLGMIMIGVIIGSRKIGINPDNVATPIAASLGDLITLALLSGISWGLYLELNHWRYIYPLVCAFFVALLPVWVVLARRSPATREVLYSGWEPVIIAMAISSVGGLILDKTVSDPNFAGMAVFTPVINGVGGNLVAVQASRISTFLHMNGMPGENSEQAPRRCPSPCTTFFSPDVNSRSARVLFLLVVPGHLVFLYTISCMQGGHTTLTLIFIIFYMTAALLQVLILLYIADWMVHWMWGRGLDPDNFSIPYLTALGDLLGTGLLALSFHVLWLIGDRDTDVGD

SEQ ID NO: 1761 - protein, 423 aa, Homo sapiens
MLCHRGGQLIVPIIPLCPEHSCRGRRLQNLLSGPWPKQPMELHNLSSPSPSLSSSVLPPSFSPSPSSAPSAFTTVGGSSGGPCHPTSSSLVSAFLAPILALEFVLGLVGNSLALFIFCIHTRPWTSNTVFLVSLVAADFLLISNLPLRVDYYLLHETWRFGAAACKVNLFMLSTNRTASVVFLTAIALNRYLKVVQPHHVLSRASVGAAARVAGGLWVGILLLNGHLLLSTFSGPSCLSYRVGTKPSASLRWHQALYLLEFFLPLALILFAIVSIGLTIRNRGLGGQAGPQRAMRVLAMVVAVYTICFLPSIIFGMASMVAFWLSACRSLDLCTQLFHGSLAFTYLNSVLDPVLYCFSSPNFLHQSRALLGLTRGRQGPVSDESSYQPSRQWRYREASRKAEAIGKLKVQGEVSLEKEGSSQG

SEQ ID NO: 1762 - protein, 382 aa, Homo sapiens
RSGAGSCEEPSRRRRARGRACSEWSLVSRRPSVSALAGPLPLRRDAGEPGSRRGRPMRNWLVLLCPCVLGAALHLWLRLRSPPPACASGAGPAGGVSLLLPRLECNGAVSAHPNLHLPGSRDSPASASQVAGITDQLALFPQWKSTHYDVVVGVLSARNNHELRNVIRSTWMRHLLQHPTLSQRVLVKFIIGAHGCEVPVEDREDPYSCKLLNITNPVLNQEIEAFSLSEDTSSGLPEDRVVSVSFRVLYPIVITSLGVFYDANDVGFQRNITVKLYQAEQEEALFIARFSPPSCGVQVNKLWYKPVEQFILPESFEGTIVWESQDLHGLVSRNLHKVTVNDGGGVLRVITAGEGALPHEFLEGVEGVAGGFIYTIQGKFAS

SEQ ID NO: 1763 - protein, 245 aa, Homo sapiens
MTLVILLVELGGSQARFPLFWRNFPITFACYAALLCLSASIIYPTTYLQFLSHGRSRDHAIAAIVFSGIACVAYATEVTWTRARPGEITDYMASELGLLKVLETFVACLIFVFINSPYVYHNRPALEWWVAVYALCFVLAALTILLSLGHCTNMLPIRFPSFLLGLALLSVLLYATALVLWPLYQFNEKYGVQPWQTRDVSCSDRNPYLVCIWDRRLAVTNLTAVNLLAYVGDLVYSAHLVFVKV

SEQ ID NO: 1764 - protein, 172 aa, Homo sapiens
PSTTIISKITVTISTTITFTTITTIILILPITISTAISQHHHHHHHHHHHHEHHLCRHQKSTQVEYSVFAERENDLGLNGTGDEALHDNGTTERVSGPPAGYLYRADYAIGLQPFMPRLGRRTPGAGGPHSRAPELAYLQKLITSPATLPFVYLETGGWSPRDAHRVDNFDM

SEQ ID NO: 1765 - protein, 824 aa, Homo sapiens
TVFPSPSSDLEIPGTYTFNGSQVLARILGLEKLLKQNSTSEDIRRELCDSYSGYIVDDAFSWTFLGRNVFNKFCLSNMTLLESSLQELNKQFSQLSSDPNNQKIVFQEIVRMLSFFSQVQEQKAVWQLLSSFPNVFQNDTSLSNLFDVLRKANSVLLVVQKVYPRFATNEGFRTLQKSVKHLLYTLDSPAQGDSDNITHVWNEDDGQTLSPSSLAAQLLILENFEDALLNISANSPYIPYLACVRNVTDSLARGSPENLRLLQSTIRFKKSFLRNGSYEDYFPPVPEVLKSKLSQLRNLTELLCESETFSLIEKSCQLSDMSFGSLCEESEFDLQLLEAAELGTEIAASLLYHDNVISKKVRDLLTGDPSKINLNMDQFLEQALQMNYLENITQLIPIIEAMLHVNNSADASEKPGQLLEMFKNVEELKEDLRRTTGMSNRTIDKLLAIPIPDNRAENTLRNPFVQVFVKFSVGLDAVELLKQIDELDILRLKLENNIDIIDQLNTLSSLTVNISSCVLYDRIQAAKTIDEMEREAKRLYKSNELFGSVIFKLPSNRSWHRGYDSGNVFLPPVIKYTIRMSLKTAQTTRSLRTKIWAPGPHNSPSHNQIYGRAFIYLQDSIERAIIELQTGRNSQEIAVQVQAIPYPCFMKDNFLTSVSYSLPIVLMVAWVVFIAAFVKKLVYEKDLRLHEYMKMMGVNSCSHFFAWLIESVGFLLVTIVILIIILKFGNILPKTNGFILFLYFSDYSFSVIAMSYLISVFFNNTNIAALIGSLIYIIAFFPFIVLVTVENELSYVLKVFMSLLSPTAFSYASQYIARYEEQGI

SEQ ID NO: 1766 - protein, 163 aa, Homo sapiens
HDHYLNINEQGTCILNSCLVQDDTDIQIVEYGGRGHDNRSLCTVVSQETSELKMRLNIAIFFGALFGALGVLLFLVAFGSDYWLLATEVGRCSGEKNIENVTFHHEGFFWRCWFNGIVEENDSNIWKFWYTNQPPSKNCTHAYLSPYPFMRGEHNSTSYDSAV

SEQ ID NO: 1767 - protein, 123 aa, Homo sapiens
MLQDYCEQVKVLSSKKRLNEYSILHFLPCLLLLSFLSSLSPFLFSSFALCLVPNIKNRKELISLPSPLQTSHYTACFLLISCLLSLNRQYQPSRSNNLSRCQGPGSVIKVGEFRKQHTSLSES

SEQ ID NO: 1768 - protein, 128 aa, Homo sapiens
MALYFCSGLLQDLAQFGHYALIMPLYTHFTHSYRERLDMAPDTLQKQADHCNDGRMASKHMKELSTGLFFAILVKESGPLESEAMVMGVLKQAFDVLVLRYGVQKRIYCNVITIFSLVEVVLWAAMAL

SEQ ID NO: 1769 - protein, 328 aa, Homo sapiens
KYSLYVGLVLAVSSSIFIGSSFILKKKGLLQLASKGFTRAGQGGHSYLKEWLWWVGLLSMGAGEAANFAAYAFAPATLVTPLGALSVLISAILSSYFLNEHLNIHGKIGCILSILGSTVMVIHAPQEEEVTSLHEMEMKLRDPGFISFAVIITVISLVLILIVAPKKGQTNILVYISICSLIGAFSVSSVKGLGIAIKELIEWKPVYKHPLVFVLLAVLVLSVTTQINYLNKALDTFNTSLVTPIYYVFFTSMVVTCSAILFQEWYGMTAGDIIGTLSGFFTIIIGIFLLHAFKNTDITWSELTSTAKKEAVSLNVNENNYVLLENLE

SEQ ID NO: 1770 - protein, 191 aa, Homo sapiens
ACTVQNESISELTMSPTAPEKMESNSTFTSFENTTVWFLGTINCITVALVFSKGKPFRQPTYTNYIFVLVLIIQLGVCLFILFADIPELYRRLDLLCTPVLWRASIVIMLSLNFIVSLVAEEAVIENRALWMMIKRCFGYQSKSQYRIWQRDLANDPSWPPLNQTSHSDMPECGRGVSYSNPVFESNEEQL

SEQ ID NO: 1771 - protein, 195 aa, Homo sapiens
RLVCGPNAIEVEIQPIWKLLVKQVLNPFYVFQAFTLTLWLSQGYIEYSVAIIILTVISIVLSVYDLRQQSVKLHNLVEDHNKVQVTIIVKDKGLEELESRLLVPGDILILPGKFSLPCDAVLIDGSCVVNEGMLTGQQILVLFALFPQPCCMFPCSTVVHTSSLRDTPHLSPVGFSSNSQYEDFDLARNAVEERH

SEQ ID NO: 1772 - protein, 137 aa, Homo sapiens
SSRMRVCAKSVLLSHWLFLAYVLMVCCKLMSASSQHLRGHAGHHQIKQGTCEVVAVHRCCNKNRIEERSQTVKCSCFPGQVAGTTRAQPSCVEASIVIQKWWCHMNPCLEGEDCKVLPDYSGWSCSSGNKVKTTKAS

SEQ ID NO: 1773 - protein, 176 aa, Homo sapiens
NNFSTEINTTSILVGPLVSNLEITHTSNLTCVKFSNTIDTTKSQCIRWVTPPTRIVCLPLGIFFVFGSLAYRCLNGFSEPMCFLSFLVPPMTIYTEQYLYNYVIPKPHNKTVLILPFVIRAGVLGGLSTGIGGITTSTQFYYKLSQELKGDMEQVTDSLVTLQDQLNSLAAVVLQN

SEQ ID NO: 1774 - protein, 336 aa, Homo sapiens
LHTQSAPFGLCPKDMMLTQAPSSVVRSRNSRNHTVNSGGSCLSASTVAIPAINDSSAAMSACSTISAQPASSMDTQMHSPKKQERVNKRVIWGIEVAEELHWKGWELGKETTRNLVLKNRSLKLQKMKYRPPKTKFFFTVIPQPIFLSPGITLTLPIVFRPLEAKEYMDQLWFEKAEGMFCVGLRATLPCHRLICRPPSLQLPMCAVGDTTEAFFCLDNVGDLPTFFTWEFSSPFQMLPATGLLEPGQASQIKVTFQPLTAVIYEVQATCWYGAGSRQRSSIQLQAVAKCAQLLVSIKHKCPEDQDAEGFQKLLYFGSVAVGCTSERQIRLHNPSA

SEQ ID NO: 1775 - protein, 348 aa, Homo sapiens
MLCPWRTANLGLLLILTIFLVAEAEGAAQPNNSLMLQTSKENHALASSSLCMDEKQITQNYSKVLAEVNTSWPVKMATNAVLCCPPIALRNLIIITWEIILRGQPSCTKAYKKETNETKETNCTDERITWVSRPDQNSDLQIRTVAITHDGYYRCIMVTPDGNFHRGYHLQVLVTPEVTLFQNRNRTAVCKAVAGKPAAHISWIPEGDCATKQEYWSNGTVTVKSTCHWEVHNVSTVTCHVSHLTGNKSLYIELLPVPGAKKSAKLYIPYIILTIIILTIVGFIWLLKVNGCRKYKLNKTESTPVVEEDEMQPYASYTEKNNPLYDTTNKVKASEALQSEVDTDLHTL

SEQ ID NO: 1776 - protein, 456 aa, Homo sapiens
WASAERERPSGARVPETPAVTPGAPRSRDRETRLCLRGSRPISPPPLWLQLHLRPEGRRWRLSREREAWTYLRDVQIMTQKGSMKPVKKKKTEEPELEPLCCCEYIDRNGEKNHVATCLCDCQDLDEGCDRWITCKSLQPETCERIMDTISDRLRIPWLRGAKKVNISIIPPLVLLPVFLHVASWHFLLGVVVLTSLPVLALWYYYLTHRRKEQTLFFLSLGLFSLGYMYYVFLQEVVPKGRVGPVQLAVLTCGLFLILLALHRAKKNPGYLSNPASGDRSLSSSQLECLSRKGQEKTKGFPGADMSGSLNNRTTKDDPKGSSKMPAGSPTKAKEDWCAKCQLVRPARAWHCRICGICVRRMDHHCVCSALSFTCVWYSVIITAGMAYIFLIQLINISYNVTEREVQQALRQKTGRRLLCGLIVDTGQYNRGFLRNWHQFSTLGTRAFHHPAEDIV

SEQ ID NO: 1777 - protein, 283 aa, Homo sapiens
LLRWDEVPDDFVECFILSGYRRLPCTAQECLASVLKPTNETLNFWTHFIPLLLFLSKFCRLFFLSGGDVPFHHPWLLPLWCYASGVLLTFAMSCTAHVFSCLSLRLRAAFFYLDYASISYYGFGSTVAYYYYLLPGLSLLDARVMTPYLQQRLGWHVDCTRLIAAYRALVLPVAFVLAVACTVACCKSRTDWCTYPFALRTFVFVMPLSMACPIMLESWLFDLRGENPTLFVHFYRRYFWLVVAAFFNVSKIPERIQPGLFDIIGHSHQLFHIFTFLSIYDQV

SEQ ID NO: 1778 - protein, 70 aa, Homo sapiens
LAKPQMCGLLAKCLQFHIVGAFIVSLGVAAVCKIAVAEPRKKTYADFYRNYDSVKDLEEMGKAGIFQNTK

SEQ ID NO: 1779 - protein, 186 aa, Homo sapiens
LGLDAELYYVRNDLISHYALSFSLLVPSETNFLHFTWHAKSKVEYKLGFQVDNVLAMDMPQVNISVQGEVPRTLSVFRVELSCTGKVDSEVMILMQLNLTVNSSKNFTVLNFKRRKMCYKKLEEVKTSALDKNTSRTIYDPVHAAPTTSTRVFYISVGVCCAVIFLVAIILAVLHLHSMKRIELDD

SEQ ID NO: 1780 - protein, 109 aa, Homo sapiens
ALRYHPDKNPGNAQAAEIFKEINAAHAILSDSKKRKIYDQHGSLGIYLYDHFGEEGVRYYFILNSCWFKTLVILCTLLTCCCFCCCCCFCCGALKPPPEQDSGRKYQQN

SEQ ID NO: 1781 - protein, 356 aa, Homo sapiens
DPELQPVLALLSLSLSMYLVTVMRNLLSILTVSSVSPLHTPMYFFLSNLCWADIGFTSATVPTMIVDMQSHSRVIPHAGCLTQMYFLVFFACIEGMLLTVMAYDCFVAICRPLHYPVIVNPHLCVFFVLLSVRLARRVDLGTHQKGPMWSLTERRRKAHRMLKLYNGLWEGEAVGLPTGPDPLDPTDLNGAHFDPEVYLDKLPRECPLAQLMDSETDMVQQIRALDSDVQTLGDLRGANWLGRGGGAGPGRSGPGHGQGTATTWAGAGRAPGAMASPSGSSKATGKPRGWDGRPRREEDDVPPEEKRLRLGLEGGSAQPEDCEDGEDAPRPGREETGTQTGGDGRGVSDAGVGVRG

SEQ ID NO: 1782 - protein, 211 aa, Homo sapiens
MANSGLQLLGYFLALGGWVGIIASTALPQWKQSSYAGDAIITAVGLYEGLWMSCASQSTGQVQCKLYDSLLALDGHIQSARALMVVAVLLGFVAMVLSVVGMKCTRVGDSNPIAKGRVAIAGGALFILAGLCTLTAVSWYATLVTQEFFNPSTPVNARYEFGPALFVGWASAGLAVLGGSFLCCTCPEPERPNSSPQPYRPGPSAAAREYV

SEQ ID NO: 1783 - protein, 239 aa, Homo sapiens
LSWAPGKGTSFFLSHDQSHSQINEVSWKDVTSALSLANMVLGLFSIIFSFSRKCHYASRMLLVSFLLDMAVRAMTSHINICSKLGAELNDFAVFTTFGLASALLLGVDGLLSGILAIIYVSAASFHLCFYSPGVPSTYKGLPCPYASCILASTSLLTKGNRFILCCMASLMILFMMDQSYYPYDKILESENWKKLVYIGGVIMLFFSPLSLSAFYCLMWSLSYIFFPDALWGKAACLSP

SEQ ID NO: 1784 - protein, 128 aa, Homo sapiens
MAIFTILILPIHEHGMFFHLFVSSLISLSSGLWFSSKRSFASLVSFIPRYFILFVAIMNVSLFMIWLYACMLLVYRNASDFCTLILYPQALLKLLISLRSFCTETMEFSRYRIMSSANKDNMTSSLSI

SEQ ID NO: 1785 - protein, 537 aa, Homo sapiens
MAALTTVVVAAAATAVAGAVAGAGAATGTGVGATPAPQQVNPGEPRAALAAGEGLQALAEQSDGCFSTSGGIRPFHLQNWKQKVNQTKKAEFVRTAEKFKNQVINMEKDKHSHFYNQKSDFRIEHSMLEELENKLIHSRKTERAKIQQQLAKIHNNVKKLQHQLKDVKPTPDFVEKLREMMEEIENAINTFKEEQRLIYEELIKEEKTTNNELSAISRKIDTWALGNSETEKAFRAISSKVPVDKVTPSTLPEEVLDFEKFLQQTGGRQGAWDDYDHQNFVKVRNKHKGKPTFMEEVLEHLPGKTQDEVQQHEKWYQKFLALEERKKESIQIWKTKKQQKREEIFKLKEKADNTPVLFHNKQEDNQKQKEEQRKKQKLAVEAWKKQKSIEMSMKCASQLKEEEEKEKKHQKERQRQFKLKLLLESYTQQKKEQEEFLRLEKEIREKAEKAEKRKNAADEISRFQERDLHKLELKILDRQAKEDEKSQKQRRLAKLKEKVENNVSRDPSRLYKPTKGWEERTKKIGPTGSGPLLHIPH

SEQ ID NO: 1786 - protein, 397 aa, Homo sapiens [sequence omitted]

SEQ ID NO: 1787 - protein, 416 aa, Homo sapiens
MGTTISGDNIGKNFTFSMRINDTSNEVTGRVLISRDELRKVPSPSQVISIAFPTIGAILEASLLENVTVNGLVLSAILPKELKRISLIFEKISKSEERRTQCVGWHSVENRWDQQACKMIQENSQQAVCKCRPSKLFTSFSILMSPHILESLILTYITYVGLGISICSLILCLSIEVLVWSQVTKTEITYLRHVCIVNIAATLLMADVWFIVASFLSGPITHHKGCVAATFFVHFFYLSVFFWMLAKALLILYGIMIVFHTLPKSVLVASLFSVGYGCPLAIAAITVAATEPGKGYLRPEICWLNWDMTKALLAFVIPALAIVVVNLITVTLVIVKTQRAAIGNSMFQEVRAIVRISKNIAILTPLLGLTWGFGVATVIDDRSLAFHIIFSLLNAFQVSPDASDQVQSERIHEDVL

SEQ ID NO: 1788 - protein, 223 aa, Homo sapiens
MSWMFLRDLLSGVNKYSTGTGWIWLAVVFVFRLLVYMVAAEHVWKDEQKEFECNSRQPGCKNVCFDDFFPISQVRLWALQLIMVSTPSLLVVLHVAYHEGREKRHRKKLYVSPGTMDGGLWYAYLISLIVKTGFEIGFLVLFYKLYDGFSVPYLIKCDLKPCPNTVDCFISKPTEKTIFILFLVITSCLCIVLNFIELSFLVLKCFIKCCLQKYLKKPQVLSV

SEQ ID NO: 1789 - protein, 64 aa, Homo sapiens
MNIVHTRRVFSPCPFPYTSLLLEPPVSIVLIFMFLCTQGLAPLISENMQYLFFFFNTSRLLIEM

SEQ ID NO: 1790 - protein, 263 aa, Homo sapiens
MRRISLTSSPVRLLLFLLLLLIALEIMVGGHSLCFNFTIKSLSRPGQPWCEAQVFLNKNLFLQYNSDNNMVKPLGLLGKKVYATSTWGELTQTLGEVGRDLRMLLCDIKPQIKTSDPSTLQVEMFCQREAERCTGASWQFATNGEKSLLFDAMNMTWTVINHEASKIKETWKKDRGLEKYFRKLSKGDCDHWLREFLGHWEAMPEPTVSPVNASDIHWSSSSLPDRWIILGAFILLVLMGIVLICVWWQNGEWQAGLWPLRTS

SEQ ID NO: 1791 - protein, 79 aa, Homo sapiens
VCVCVCVCVCVCVHAYVGRYICVCVCVVCAYLVYMFTHYKHIQGKLKGIIFYTYSSPSLFSRTFTIIKDTSSYGDISKN

SEQ ID NO: 1792 - protein, 338 aa, Homo sapiens
MAGSHPYFNLPDSTHPSPPSAPPSLRWHQRCQPSGATNGLLVALLGGGLPAGFVGPLSRMAYQGSNLPSLELLICRCLFHLPIALLLKLRGDPLLGPPDIRGWACFCALLNVLSIGCAYSAVQVVPAGNAATVRKGSSTVCSAVLTLCLESQGLGGYEWCGLLGSILGLIIILGPGLWTLQEGTTGVYTTLGYVQAFLGGLALSLGLLVYRSLHFPSCLPTVAFLSGLVGLLGCVPGLFVLQTPVLPSDLLSWSCVGAEGILALVSFTCVGYAVTKAHPALVCAVLHSEVVVALILQYYMLHETVALSDIMGAGVVLGSIAIITARNLSCERTGKVEE

SEQ ID NO: 1793 - protein, 178 aa, Homo sapiens
ILSLVFLDDVQWMNKWRLYYQVLNFGMIVSSALMIWKGLMVITGSESPIVLLSGSMEPAFHRGYLLFLTNRVEDPIRVGEIAVLRIEGRKIPIVHRVLKIHEKQNGHIKFLTKGDNNAVDDRGLYKQDQHWLEKKDVVGRARGFVPYIGIGTSLMNDYPKHKYEVLFLLGLFVLVHRE

SEQ ID NO: 1794 - protein, 95 aa, Homo sapiens
IYINIILAYTISLLGILTYRSHLIASLICLEGIILSLFIINTLITLNIHFTLAFIIPITLPVFAACKAAVGLALLVSISNTYGLDYVHNLNLLQC

SEQ ID NO: 1795 - protein, 184 aa, Homo sapiens
QAAMGSVGSQCLEEPSVAGTPDPGIVMSVTFDSHQLEEAAEAAQGQGLRARGVPAFTDTTLEEPVPNDRYHAIYFAMLLSGVGFLLPYNSFITDVDYLHHKYPGTSIVFDMSLTYILVALAAVLLNNVLVERLTLHTRITASYLLALGPLLFISICDVWLQLFSRDQAYAINLAAVGTVAFGCT

SEQ ID NO: 1796 - protein, 284 aa, Homo sapiens
MHARLLGLSALLQAAEQSARLYTVAYYFTTGRLLWGWLALAVLLPGFLVQALSYLWFRADGHPGHCSLVMLHLLQLGVWKRHWDAALTSLQKELEAPHRGWLQLQEADLSALRLLEALLQTGPHLLLQTYVFLASDFTDIVPGVSTLFSWSSLSWALVSYTRFMGFMKPGHLAMPWAALFCQQLWRMGMLGTRVLSLVLFYKAYHFWVFVVAGAHWLVMTFWLVAQQSDIIDSTCHWRLFNLLVGAVYILCYLSFWDSPSRNRMVTFYMASGTFLYPNFYSVYS

SEQ ID NO: 1797 - protein, 68 aa, Homo sapiens
MRSKWQMENSNLDLSHFKGHTVDHYNVLVWVVKMRPTIICYLSVCMCVCVCVCVCVISKLCSSTDSSR

SEQ ID NO: 1798 - protein, 351 aa, Homo sapiens
GMSLTSEWFAKYLQSSAAACWVYANLTSCQALGNMCVMNMNSYDFATFDACGLFQFIFENTAGLSTVHSISFWRQNLPWLFYGDQLGLAPQVLSSTSLPTNFSFKGENQNTKLKFVAASYDIRGNFLKWQTLEGGVLQLCPDTETRLNAAYSFGTTYQQNCEIPISKILIDFPTPIFYDVYLEYTDENQHQYILAVPVLNLNLQHNKIFVNQDSNSGKWLLTRRIFLVDAVSGRENDLGTQPRVIRVATQISLSVHLVPNTINGNIYPPLITIAYSDIDIKDANSQSVKTVVKFLVYYAGDLANVFFIITVGTGLYWLIFFKAQKSVSVLLPMPIQEERFVTYVGCAFALK

SEQ ID NO: 1799 - protein, 276 aa, Homo sapiens
MNSLSWGAANAVLLLLLLAWASPTFISINRGVRVMKGHSAFLSGDDLKFAIPKEKDACKVEVVMNEPITQRVGKLTPQVFDCHFLPNEVKYVHNGCPILDEDTVKLRLYRFTERDTFIETFILWVYLLEPDCNIIHMSNNVLEVPEFNGLSQAIDKNLLRFDYDRMASLECTVSLDTARTRLPAHGQMVLGEPRPEEPRGDQPHSFFPESQLRAKLKCPGGSCTPGLKKIGSLKVSCEEFLLMGLRYQHLDPPSPNIDYISIQLDLTDTRSKIVYK

SEQ ID NO: 1800 - protein, 899 aa, Homo sapiens
MARHGCLGLGLFCCVLFAATVGPQPTPSIPGAPATTLTPVPQSEASMLSLNLGLNFKFHLRGPAAVWGSPVTETQPLSLGPGQEPGEEVASGLRTDPLWELLVGSSGNSLTEWGSTEGGSKPRASSLLPESTSRRSGPSDGPTAPYQPRRSTVTWDTALMVTALPSSAPRPHQSELELKFDMALRAGAAPTLGHRTLPLLPSLRASLAEIAGRLGPFGFFGTTLSPLRNFSGLSPPGETTSTSSASGVSGSLGFLGTTLSLPPYSLERKLSSPSPLDPAASLSFASIATTSLDPTVPISGPDDLSPPASLGNPSGQPECGPGSCSVGELPEREGQPPEAPRPLFFLTLEADWAEARARWGLAWEAHVYGVGALFGLVALLALLALALLPWRCPPGAPCLALLDLLLLSAGTTRAFPLFYDAYGHRDRLPALAWLLLQDLPLPCLAAGLGLACLLLARPRPPRCPTGLAALLLLGLGLAAAAALGSAAHRPLRPLRLASRGLHAFLAAFLSGLLLALSCWGGRRRRAGAPLGGSGFKGATPLPQGRSPFAPRESWRRAARTAPVAGTFGLLSGALQGYEVLHALGYGGQSGLEGPWPWWAFQLGLRLGEVGVALPLALLGLYPALCSPRVPPRCWAKLFRLSPGHAAPLLPGGWVTGPPDKEPLGSAIARGDAELLQLCALAGPGPDLLLQGGGCRGFEGAAANPAPSPASSPCSDYTVDFRPPSPINLRRSIEEALCSEALLAPGLFQGPAFEDALPGLGLYRTASLGTGGRASERSGEASGPAAPPELPSPGAWPAGSSVSSGSFCGLSRDSSSMLLCSSPDRPPRCPLVCVLSPPRPSGSSPSLPASGSYQALSPPSRDSPEPASELQAEEALLQEQFLDACRQIDELSVGSDTIDL

SEQ ID NO: 1801 - protein, 244 aa, Homo sapiens
MGDLFSLFWEVDPPPIPVNCAIPNQDYECWKDDSCGTIGSFLLWYFVIVFVLMFFSRASVWMSEDKKDEGSGTSTSVRKASKETSCKRQSKDSAWDPSQTMKKPKQNQLTPVTNSEVALVNAYPEQRRARRQSQFNEVNQNQHDSDTTEYGSEESNSEASSWKESESEHHPSPDSIKRRKMAQRQRNLGSYQMSERHCLHCKALRTNEWLAHHSRQKPSVTPPMKRDSQEESSISDINKKFSKF

SEQ ID NO: 1802 - protein, 257 aa, Homo sapiens
DTHLHTPMYFFLGNFSLLEILVTMTAVPRMLSDLLVPHKVITFTGCMVQFYFHFSLGSTSFLILTDMALDRFVAICHPLRYGTLMSRAMCVQLAGAAWAAPFLAMVPTVLSRAHLDYCHGDVINHFFCDNEPLLQLSCSDTRLLEFWDFLMALTFVLSSFLVTLISYGYIVTTVLRIPSASSCQKAFSTCGSHLTLVFIGYSSTIFLYVRPGKAHSVQVRKVVALVTSVLTPFLNPFILTFCNQTVKTVLQGQMQRL

SEQ ID NO: 1803 - protein, 126 aa, Homo sapiens
HTAESSVSSSSSHRQSKSSGGSSSGTITDEDELTGILKKLSLEKYQPIFEEQEVDMEAFLTLTDGDLKELGIKTDGSRQQILAAISELNAGKHCAVQRRLLSALPGLEVVVFVVTVVILITCLKAI

SEQ ID NO: 1804 - protein, 197 aa, Homo sapiens
QFSVFALTTIGWILSSTSTGLVEWRIWYMKDTSLYPPGIACVGIFRVCIYRRRTNSTTTKFCYRYSYQDTFLPFEISMAQRFLLTASIFGFFGRAFNMFALRNMSMRMFEEDTYNSFVVSGILNIAAGVFNLIAVLQNYDAVINSQGITFLPSLQMPFKPDVQEVGTAIQVAGIGVLPMLLTGMFSLFYKCPPYGQV

SEQ ID NO: 1805 - protein, 255 aa, Homo sapiens
EEFVLDPHGILRSAVVFQHTESLEYVLCVQAKDSGKPQQVSHTYIRVRVIEESTHKPTAIPLEIFIVTMEDDFPGGVIGKIHATDQDMYDVLTFALKSEQKSLFKVNSHDGKIIALGGLDSGKYVLNVSVSDGRFQVPIDVVVHVEQLVHEMLQNTVTIRFENVSPEDFVGLHMHGFRRTLRNAVLTQKQDSLRIISIQPVAGTNQLDMLFAVEMHSSEFYKPAYLIQKLSNARRHLENIMRISAILEKNCSGLD

SEQ ID NO: 1806 - protein, 93 aa, Homo sapiens
MEVVLIFVYSLLVPVVLASAAKEKEIDPFHYNYQTLRIGGLVFDVVLFLPSCHLLSHRCKCSFNQKPQDPGDKEAQVENFITANAKEPQKAKN

SEQ ID NO: 1807 - protein, 171 aa, Homo sapiens
ALVLCYFLETNAKQYNMVDKNVIEIGAGTGLVSIVASLLGAHVTATDLPELLGNLQYNISRNTKMKSKHLPQVKELSWGVALDTNFPRSSNNFDYILAADVVYAHPFLEELLITFDHLCKETTIILWAMKFRLEKENKFVDRFKELFDLEEISSFPSLNIKLYKAVKKNRR

SEQ ID NO: 1808 - protein, 508 aa, Homo sapiens
MTSTCTNSTRESNSSHTCMPLSKMPISLAHGIIRSTVLVIFLAASFVGNIVLALVLQRKPQLLQVTNRFIFNLLVTDLLQISLVAPWVVATSVPLFWPLNSHFCTALVSLTHLFAFASVNTIVVVSVDRYLSIIHPLSYPSKMTQRRGYLLLYGTWIVAILQSTPPLYGWGQAAFDERNALCSMIWGASPSYTILSVVSFIVIPLIVMIACYSVVFCAARRQHALLYNVKRHSLEVRVKDCVENEDEEGAEKKEEFQDESEFRRQHEGEVKAKEGRMEAKDGSLKAKEGSTGTSESSVEARGSEEVRESSTVASDGSMEGKEGSTKVEENSMKADKGRTEVNQCSIDLGEDDMEFGEDDINFSEDDVEAVNIPESLPPSRRNSNSNPPLPRCYQCKAAKVIFIIIFSYVLSLGPYCFLAVLAVWVDVETQVPQWVITIIIWLFFLQCCIHPYVYGYMHKTIKKEIQDMLKKFFCKEKPPKEDSHPDLPGTEGGTEGKIVPSYDSATFP

SEQ ID NO: 1809 - protein, 329 aa, Homo sapiens
MFFKKLSCRFCITLSSLMLLTQRVTSLSLDICEGKVKAASGGFRSRSSLSEHVCKALPYFSYLLFFPALLGGSLCSFQRFQARVQGSSALHPRHSFWALSWRGLQILGLECLNVAVSRVVDAGAGLTDCQQFECIYVVWTTAGLFKLTYYSHWILDDSLLHAAGFGPELGQSPGEEGYVPDADIWTLERTHRISVFSRKWNQSTARWLRRLVFQHSRAWPLLQTFAFSAWWHGLHPGQVFGFVCWAVMVEADYLIHSFANEFIRSWPMRLFYRTLTWAHTQLIIAYIMLAVEVRSLSSLWLLCNSYNSVFPMVYCILLLLLAKRKHKCN

SEQ ID NO: 1810 - protein, 114 aa, Homo sapiens
MSWKNLYIIFNTLILLPNVTFLKRFFLLYFSPLKVDLPLADGDLINTRKLCQCKRLQEKSFSGYKKIPFGLGLQTRDIYRVHFYMWINIVLCIVCVGRSTSIIRPSSATIAAYF

SEQ ID NO: 1811 - protein, 416 aa, Homo sapiens
MKRERGALSRASRALRLAPFVYLLLIQTDPLEGVNITSPVRLIHGTVGKSALLSVQYSSTSSDRPVVKWQLKRDKPVTVVQSIGTEVIGTLRPDYRDRIRLFENGSLLLSDLQLADEGTYEVEISITDDTFTGEKTINLTVDVPISRPQVLVASTTVLELSEAFTLNCSHENGTKPSYTWLKDGKPLLNDSRMLLSPDQKVLTITRVLMEDDDLYSCMVENPISQGRSLPVKITVYRRSSLYIILSTGGIFLLVTLVTVCACWKPSKRKQKKLEKQNSLEYMDQNDDRLKPEADTLPRSGEQERKNPMALYILKDKDSPETEENPAPEPRSATEPGPPGYSVSPAVPGRSPGLPIRSARRYPRSPARSPATGRTHSSPPRAPSSPGRSRSASRTLRTAGVHIIREQDEAGPVEISA

SEQ ID NO: 1812 - protein, 243 aa, Homo sapiens
MQLQVFWTGLEYTCRLLGITTAAVLIGVGTETFLQGQFKSLAFYLLFTGAAVSICEGAYFVAQLLAICFQCQPGSLADRVREKAHWLGCFQKFLAYLLLSVACFLHPVLVWHVTIPGSMLIITGLAYFLLSKRKKRKAAPEVLASPEQYTDPSSSAVSTTGSGDTEQTYTFHGALKEGPSSLFIHMKSILKGTKKPSALQPPNTLMELSLEPADSLAKKKQVHFEDNLVRIVPSLAEGLDDGD

SEQ ID NO: 1813 - protein, 337 aa, Homo sapiens
MNEPLDYLANASDFPDYAAAFGNCTDENIPLKMHYLPVIYGIIFLVGFPGNAVVISTYIFKMRPWKSSTIIMLNLACTDLLYLTSLPFLIHYYASGENWIFGDFMCKFIRFSFHFNLYSSILFLTCFSIFRYCVIIHPMSCFSIHKTRCAVVACAVVWIISLVAVIPMTFLITSTNRTNRSACLDLTSSDELNTIKWYNLILTATTFCLPLVIVTLCYTTIIHTLTHGLQTDSCLKQKARRLTILLLLAFYVCFLPFHILRVIRIESRLLSISCSIENQIHEAYIVSRPLAALNTFGNLLLYVVVSDNFQQAVCSTVRCKVSGNLEQAKKISYSNNP

SEQ ID NO: 1814 - protein, 95 aa, Homo sapiens
VGGAQVLATGKTPGAEIDFKYALIGTAVGVAISAGFLALKICMIRRHLFDDDSSDLKSTPGGLSDTIPLKKRAPRACNQLQGVLEMCGRIGDISG

SEQ ID NO: 1815 - protein, 213 aa, Homo sapiens
IIDMSLASFATPKMITDYLTGHKTISFDGCLTQIFFLHLFTGTEIILLMAMSFDRYIAICKPLHYASVISPQVCVALVVASWIMGVMHSMSQVIFALTLPFCGPYEVDSFFCDLPVVFQLACVDTYVLGLFMISTSGIIALSCFIVLFNSYVIVLVTVKHHSSRGSSKALSTCTAHFIVVFLFFGPCIFIYMWPLSSFLTDKILSVFYTIFTP

SEQ ID NO: 1816 - protein, 166 aa, Homo sapiens
MLPFFSNTTSKSVSVSSFQGSPATPLSFLFFFFLCRAGSSMTGCFTFFLDFIFFFAGVLGPSPMGMYSGASTLTGFFLLRFLGQLSMDLEGLEWLGRASPSWWIFFSSSPSHRVPWGSCASASAPRLPVPHPPSPLSKCPQHPRPRRTKGPGLRKLWGPGPPFFPS

SEQ ID NO: 1817 - protein, 74 aa, Homo sapiens
MIKHSWIHLYVMASAMSSSPIFFFFQRWSLTLSLRLECSSAIIKPTAASNSCVQVNLPPSMCDYRHEPLCLAFL

SEQ ID NO: 1818 - protein, 214 aa, Homo sapiens
MKLNLVQIFFMLLMLLLGLGMGLGLGLHMATAVLEESDQPLNEFWSSDSQDKAEATEEGDGTQTTETLVLSNKEVVQPGWPEDPILGEDEVGGNKMLRASALFQSNKDYLRLDQTDRECNDMMAHKMKEPSQSCIAQYAFIHEDLNTVKAVCNSPVIACELKGGKCHKSSRPFDLTLCELSQPDQVTPNCNYLTSVIKKHIIITCNDMKRQLPT

SEQ ID NO: 1819 - protein, 129 aa, Homo sapiens
WLPESARYDVLSGNQEKAIATLKRIATENGAPMPLGKLIISRQEDRGKMRDLFTPHFRWTTLLLWFIWFSNAFSYYGLVLLTTELFQAGDVCGISSRKKAVEAKCSLACEYLSEEDYMDLLWTTLSEFP

SEQ ID NO: 1820 - protein, 306 aa, Homo sapiens
TCPFSCKCDSRSLEVDCSGLGLTTVPPDVPAATRTLLLLNNKLSALPSWAFANLSSLQRLDLSNNFLDRLPRSIFGDLTNLTELQLRNNSIRTLDRDLLRHSPLLRHLDLSINGLAQLPPGLFDGLLALRSLSLRSNRLQNLDRLTFEPLANLQLLQVGDNPWECDCNLREFKHWMEWFSYRGGRLDQLACTLPKELRGKDMRMVPMEMFNYCSQLEDENSSAGLDIPGPPCTKASPEPAKPKPGAEPEPEPSTACPQKQRHRPASVRRAMGTVIIAGVVCGVVCIMMVVAAAYGCIYASLMAKYH

SEQ ID NO: 1821 - protein, 180 aa, Homo sapiens
NNFSTEINTTSILIGPLVSNLEITHTSNLTCVKFSNTIDTPNSQCIRWVSHPTRIVCLPSGIFFVCGTSAYRCFKGSSESICFLSFLVPPMTIYTEQDLYNHVVPKPRNKRVPILTFVVGAGGLGGLGTGIGGITTSTQFYYKLSQELNGDMEWVADSLVTLQDQLNSLVAVVLQNRRAL

SEQ ID NO: 1822 - protein, 385 aa, Homo sapiens
PRRKYHVRLLAYNNIDDGYQADQTVSTPGCVSVRDRMVPPPPPPHHLYAKANTSSSIFLHWRRPAFTAAQIINYTIRCNPVGLQNASLVLYLQTSETHMLVQGLEPNTKYEFAVRLHVDQLSSPWSPVVYHSTLPEAPAGPPVGVKVTLIEDDTALVSWKPPDGPETVVTRYTILYASRKAWIAGEWQVLHREGAITMALLENLVAGNVYIVKISASNEVGEGPFSNSVELAVLPKETSESNQRPKRLDSADAKVYSGYYHLDQKSMTGIAVGVGIALTCILICVLILIYRSKARKSSASKTAQNGTQQLPRTSASLASGNEVGKNLEGAVGNEESLMPMIMPNSFIDAKGGTDLIINSYGPIIKNNSKKKWFFFQDSKKIQVEQ

SEQ ID NO: 1823 - protein, 226 aa, Homo sapiens
QGGTEWPLEGQRLQAVSVPSAGTRGARAAAGGAPRLLPAPQPCLGPQAAADPEGRPGGTAGHLGPCTCQVLGFAAFFALVLKRVDDEEDTVAPLPGHLLGPDPYALFRARRNSSRDVYQPPLTAAIEKMKTTHLKEQKAFALIREILAYLGFLWMLLLVAYGQRDPSAYHLNRHLQHSFTRGFSGVLGFREFFKWANTTLVSNLYGHPPAAAGISQRMPCTIFPGC

SEQ ID NO: 1824 - protein, 435 aa, Homo sapiens
MAQAVWSRLGRILWLACLLPWAPAGVAAGLYELNLTTDSPATTGAVVTISASLVAKDNGSLALPADAHLYRFHWIHTPLVLTGKMEKGLSSTIRVVGHVPGEFPVSVWVTAADCWMCQPVARGFVVLPITEFLVGDLVVTQNTSLPWPSSYLTKTVLKVSFLLHDPSNFLKTALFLYSWDFGDGTQMVTEDSVVYYNYSIIGTFTVKLKVVAEWEEVEPDATRAVKQKTGDFSASLKLQETLRGIQVLGPTLIQTFQKMTVTLNFLGSPPLTVCWRLKPECLPLEEGECHPVSVASTAYNLTHTFRDPGDYCFSIRAENIISKTHQYHKIQVWPSRIQPAVFAFPCATLITVMLAFIMYMTLRNATQQKDMVEVADFDFSPMSDKNPEPPSGVRCCCQMCCGPFLLETPSEYLEIVRENHGLLPPLYKSVKTYTV

SEQ ID NO: 1825 - protein, 215 aa, Homo sapiens
MGLEKPQSKLEGGMHPQLIPSVIAVVFILLLSVCFIASCLVTHHNFSRCKRGTGVHKLEHHAKLKCIKEKSELKSAEGSTWNCCPIDWRAFQSNCYFPLTDNKTWAESERNCSGMGAHLMTISTEAEQNFIIQFLDRRLSYFLGLRDENAKGQWRWVDQTPFNPRRVFWHKNEPDNSQGENCVVLVYNQDKWAWNDVPCNFEASRICKIPGTTLN

SEQ ID NO: 1826 - protein, 329 aa, Homo sapiens
GAVCSVGHGRQHPHGHLRVASSCSCCTGASVRNATEPPGVSPSPIPNSQRLSGTLKVGFGAMEGQTPGSRGLPEKPHPATAAATLSSMGAVFILMKSALGAGLLNFPWAFSKAGGVVPAFLVELVSLVFLISGLVILGYAAAVSGQATYQGVVRGLCGPAIGKLCEACFLLNLLMISVAFLRVIGDQLEKLCDSLLSGTPPAPQPWYADQRFTLPLLSVLVILPLSAPREIAFQKYTSILGTLAACYLALVITVQYYLWPQGLVRESHPSLSPASWTSVFSVFPTICFGFQCHEAAVSIYCSMRKRSLSHWALVSVLSLLACCLIYSLT

SEQ ID NO: 1827 - protein, 158 aa, Homo sapiens
RHPLATFFHLFFRVSAIVTYVSCDWFSKSFVGCFVMVLLLLSLDFWSVKNVTGRLLVGLRWWNQIDEDGKSHWIFEARKVSPNSIAATEAEARIFWLGLIICPMIWIVFFFSTLFSLKLKWLALVVAGISLQAANLYGYILCKMGGNSDIGKVTASFL

SEQ ID NO: 1828 - protein, 229 aa, Homo sapiens
MCGPRRLAAPGSSLGSFGRASRGGRRGSSGGRAAEPGLGDTMRRVLRLLLGCFLTELCARVCRAQERAGHGQLAQLGGVLLLAGGNRSGAASGEASEGAEASDAPPTRAPTPDFCRGYFDVMGQWDPPFNCSSGDFIFCCGTCGFRFCCTFKKRRLNQSTCTNYDTPLWLNTGKPPARKDDPLHDPTKDKTNLIVYIICGVVAVMVLVGIFTKLGLEKAHRPQREHMSR

SEQ ID NO: 1829 - protein, 289 aa, Homo sapiens
LLVALLGGGLPAGFVGPLSRMAYQASNLPSLELLIWRCLFHLPIALLLKLRGDPLLGTPDIRSRAFFCALLNILSIGCAYSAVQVVPAGNAATVRKGSSTVCSAVLTLCLESQGLSGYDWCGLLGCILGLIIIVGPGLWTLQEGTTGVYTALGYVEAFLGGLALSLRLLVYRSLHFPPCLPTVAFLSGLVGLLGSVPGLFVLQAPVLPSDLLSWSCVGAVGILALVSFTCVGYAVTKAHPALVCAVLHSEVVVALILQYYMLHETVAPSDIVAAGVVLGSIAIITAQNL

SEQ ID NO: 1830 - protein, 135 aa, Homo sapiens
MNCDALLHHSAIPEDFLHIFLLLQKSVSLPLSLSQSVCLFYSISLCVSLLLHISLCVSVYVSLSLSSFPCFSLTHTHTHSQLSKDTSVLTFTFCFKQHTHFTLNYTSHAHELSAPSVHPTCVFTFKAAPSPRPAT

SEQ ID NO: 1831 - protein, 373 aa, Homo sapiens
IISPVLSYRILTLFPNAIARKLLLMLTFILIFWIIYLASKDHTKFSFNLENHIILNQGNIFKKYSHSETPLCPAVSPKETELRIKDIMEKLDQQIPPRPFTHVNTTTSATHSTATILNPQDTYCRGDQLDILLEVRDHLGHRKQYGGDFLRARMYSTALMAGASGKVTDFNNGTYLVSFTLFWEGQVSLSLLLIHPSEGVSALWRARNQGCDRIIFTGLFANRSSNVFTECGLTLNTNAELCQYMDDRDQEAFYCVRPQHMPCEALTHMTTRTRNISYLSKEEWRLFHRSNIGVEMMKNFTPIEVIPCNSKHEPPCPALFYFIFRDSLTLSPRLECSGMISAHCNLCLPGSSDSPDSASHVAGITSVQRHTWL

SEQ ID NO: 1832 - protein, 305 aa, Homo sapiens
LCFPGSLSTMSAAPASNGVFVVIPPNNASGLCPPPAILPTSMCQPPGIMQFEEPPLGAQTPRATQPPDLRPVETFLTGEPKVLGGAVWNRARGTEPRGFPQTVQILIGLIHLGFGSVLLMVRRGHVGIFFIEGGVPFWGGACFIISGSLSVAAEKNHTSCLALGGDGGFEQEGMSFMSGSENTAMKIMNTAAKVMNIAVKVRSSLGTNILSVMAAFAGTAILLMDFGVTNRDVDRGYLAVLTIFTVLEFFTAVIAMHFGCQAIHAQASAPVIFLPNAFSADFNIPSPAASAPPAYDNVAYAQGVV

SEQ ID NO: 1833 - protein, 140 aa, Homo sapiens
AFHITIALLHLVFGGYLASIVKNLHLVVLKSWYPFWGAASFLISGILAITMKTFSKTYLKMLCLMTNLISLFCVLSGLFVISKDLFLESPFESPIWRMYPNSTVHIQRLELALLCFTVLELFLPVPTAVTAWRGDCPSAK

SEQ ID NO: 1834 - protein, 160 aa, Homo sapiens
MLSPHIYLPKCWNYRHEPLCLAVCFHFQLSLCFCCFILSLLCLCVLFNSLFKTPRTCTASTGNIFWQASQEVIPKFGVYFSCLFFLLHTGESQSLSLFSFPTWDGWWAAPKHRGNCRFLAGATLKDSFLSFPVVVPDPYVWHSLGRAGICFSDLNLVFSC

SEQ ID NO: 1835 - protein, 179 aa, Homo sapiens
NNFSTEINTTSVLVGPLSNLEITHTSNLTCVKFSNTIDTTNSQCIRWVTPPTRIVCLPSGIFFVCGTSAYHCLNGSSESVCFLSFLVAPMPIYTEQDLYNHVIPKPRNKRVPILPFVIGAGVLGGVATGIGGITTSTQFYYKLSQELNGDMEWVADTLVTLQDQLNSLAAVVLQNRRAL

SEQ ID NO: 1836 - protein, 277 aa, Homo sapiens
MPQLSLSWLGLGQVAAFPWLLLLLAGASRLLAGFLAWTYAFYDNCRRLQYFPQPPKQKWFWGQPGPQEGLKNLTQMSATYPQGFRIWLGPIFPFIVLCHPDIVRSITNASAAIAPKDDLSIRFLKPWLGEGILLSGGDKWSRHRRMLTPAFHFNILKPYIKIFNRSVNIMHDKWQHLASEGSSRLDMFEHISLMTLDSLQKCIFSFDSHCQERPSEYIATILELSALVEKRNQHILQHMDFLYYLSHDGWRFRRACRLVHDFTDAVIQERRHTLPTQ

SEQ ID NO: 1837 - protein, 505 aa, Homo sapiens
CGSRSGAGAGAGGMEPLRAPALRRLLPPLLLLLLSLPPRARAKYVRGNLSSKEDWVFLTRFCFLSDYGRLDFRFRYPEAKCCQNILLYFDDPSQWPAVYKAGDKDCLAKESVIRPENNQVINLTTQYAWSGCQVVSEEGTRYLSCSSGRSFRSVRERWWYIALSKCGGDGLQLEYEMVLTNGKSFWTRHFSADEFGILETDVTFLLIFILIFFLSCYFGYLLKGRQLLHTTYKMFMAAAGVEVLSLLFFCIYWGQYATDGIGNESVKILAKLLFSSSFLIFLLMLILLGKGFTVTRCPGRACSWGGWGRISHAGSVKLSVYMTLYTLTHVVLLIYEAEFFDPGQVLYTYESPAGYGLIGLQVAAYVWFCYAVLVSLRHFPEKQPFYVPFFAAYTLWFFAVPVMALIANFGIPKWAREKIVNGIQLGIHLYAHGVFLIMTRPSAANKNFPYHVRTSQIASAGVPGPGGSQSADKAFPQHVYGNVTFISDSVPNFTELFSIPPPATS

SEQ ID NO: 1838 - protein, 103 aa, Homo sapiens
KDNKDCSSYGSFSDAVLELFKLTIGLGDLNIQQNSKYPILFLFLLITYVILTFVLLLNMLIALMGETVENVSKESERIWRLQVSLGGDPSVGASTGLSSARGH

SEQ ID NO: 1839 - protein, 489 aa, Homo sapiens
AGVSAAGDEVQTLSGSVRRAPTGPPGTPGTPGCAATAKGPGAQQPKPASLGRGRGAAAAILSLGNVLNYLDRYTVAGVLLDIQQHFGVKDRGAGLLQSVFICSFMVAAPIFGYLGDRFNRKVILSCGIFFWSAVTFSSSFIPQQYFWLLVLSRGLVGIGEASYSTIAPTIIGDLFTKNTRTLMLSVFYFAIPLGSGLGYITGSSVKQAAGDWHWALRVSPVLGMITGTLILILVPATKRGHADQLGDQLKARTSWLRDMKALIRNRSYVFSSLATSAVSFATGALGMWIPLYLHRAQVVQKTAETCNSPPCGAKDSLIFGAITCFTGFLGVVTGAGATRWCRLKTQRADPLVCAVGMLGSAIFICLIFVAAKSSIVGAYICIFVGETLLFSNWAITADILMYVVIPTRRATAVALQSFTSHLLGDAGSPYLIGFISDLIRQSTKDSPLWEFLSLGYALMLCPFVVVLGGMFFLATALFFVSDRARAEQQ

SEQ ID NO: 1840 - protein, 264 aa, Homo sapiens
MPSIFAYQSSEVDWCESNFQYSELVAEFYNTFSNIPFFIFGPLMMLLMHPYAQKRSRYIYVVWVLFMIIGLFSMYFHMTLSFLGQLLDEIAILWLLGSGYSIWMPRCYFPSFLGGNRSQFIRLVFITTVVSTLLSFLRPTVNAYALNSIALHILYIVCQEYRKTSNKELRHLIEVSVVLWAVALTSWISDRLLCSFWQRIHFFYLHSIWHVLISITFPYGMVTMALVDANYEMPGETLKVRYWPRDSWPVGLPYVEIRGDDKDC

SEQ ID NO: 1841 - protein, 131 aa, Homo sapiens
MSREGRAPASVGGTQGPASPSLSLGDWRTGGGVWLGGWRTGGGVWQPDSWRTGGGVWWLAGYVFLVLLSDAWKIVLRGQGSSRDPRALGSCRGLGGRLLSAHELLKMERRAGVVAHPYNPSTLGGRGERII

SEQ ID NO: 1842 - protein, 207 aa, Homo sapiens
MYLVTVLGNLLIILAIGSDSHLDTPMYFFLSNLSLPDIGFTSATVPKMIEEMQSHSRVIYHGDCLTQMSFFVLFACKDDMILTVMAYDWFVAICHPLNYPGIMNPHLCVLLVLVPFFLSLLDSQLHNLIVLQFICFKNVEISNFFCDPFQRLNLACSDSDINNIYIYLDSTIFGFLRISGILLCYYTVVFPILRIPSSDGNYKAFST

SEQ ID NO: 1843 - protein, 271 aa, Homo sapiens
MNIILEILLLLITIIYSYLESLVKFFIPQRRKSVAGEIVLITGAGHGIGRQTTYEFAKRQSILVLWDINKRGVEETAAECRKLGVTAHAYVVDCSNREEIYRSLNQVKKEVGDVTIVVNNAGTVYPADLLSTKDEEITKTFEVNILGHFWITKALLPSMMERNHGHIVTVASVCGHEGIPYLIPYCSSKFAAVGFHRGLTSELQALGKTGIKTSCLCPVFVNTGFTKNPSTRLWPVLETDEVVRSLIDGILTNKKMIFVPSYINIFLRLQK

SEQ ID NO: 1844 - protein, 213 aa, Homo sapiens
FADSCFSTSTAPRLIVDALSEKKIITYNECMTQVFALHLFGCMEIFVLILMAVDRYVAICKPLRYPTIMSQQVCIILIVLAWIGSLIHSTAQIILALRLPFCGPYLIDHYCCDLQPLLKLACMDTYMINLLLVSNSGAICSSSFMILIISYIVILHSLRNHSAKGKKKALSACTSHIIVVILFFGPCIFIYTRPPTTFPMDKMVAVFYTIGTP

SEQ ID NO: 1845 - protein, 309 aa, Homo sapiens
MAHINCTQATEFILVGLTDHQELKMPLFVLFLSIYLFTVVGNLGLILLIRADTSLNTPMYFFLSNLAFVDFCYSSVITPKMLGNFLYKQNVISFDACATQLGCFLTFMISESLLLASMAYDRYVAICNPLLYMVVMTPGICIQLVAVPYSYSFLMALFHTILTFRLSYCHSNIVNHFYCDDMPLLRLTCSDTRFKQLWIFACAGIMFISSLLIVFVSYMFIISAILRMHSAEGRQKAFSTCGSHMLAVTIFYGTLIFMYLQPSSSHALDTDKMASVFYTVIIPMLNPLIYSLQNKEVKEALKKIIINKN

SEQ ID NO: 1846 - protein, 557 aa, Homo sapiens
RLVLCNDMDMNELPTNLPVDTVKLRIEKTVIRRISAEAFYYLVELQYLWVTYNSVASIDPSSFYNLKQLHELRLDGNSLAAFPWASLLDMPLLRTLDLHNNKITSVPNEALRYLKNLAYLDLSSNRLTTLPPDFLESWTHLVSTPSGVLDLSPSRIILGLQDNPWFCDCHISKMIELSKVVDPAIVLLDPLMTCSEPERLTGILFQRAELEHCLKPSVMTSATKIMSALGSNVLLRCDATGFPTPQITWTRSDSSPVNYTVIQESPEEGVRWSIMSLTGISSKDAGDYKCKAKNLAGMSEAVVTVTVLGITTTPIPPDTSERTGDHPENLKVAKNGSKLPPASTSKKEELALLDQTMLTETNAAIENLRVVSETKESVTLTWNMINTTHNSAVTVLYSKYGGKDLLLLNADSSKNQVTIDGLEPGGQYMACVCPKGVPPQKDQCITFSTERVEGDDSQWSLLLVVTSTACVVILPLICFLLYKVCKLQCKSEPFWEDDLAKETYIQFETLFPRSQSVGELWTRSHRDDSEKLLLCSRSSVESQVTFKSEGSRPEYYC

SEQ ID NO: 1847 - protein, 231 aa, Homo sapiens [sequence omitted]

SEQ ID NO: 1848 - protein, 306 aa, Homo sapiens
NHSSLAEFVFLGFASVGYVRGWLFVLLLLAYLFTICGNMLIFSVIRLDAALHTPMYHFVSVLSFLELWYTATTIPKMLSNILSEKKTISFAGCLLQTYFFHSLGASECYLLTAMAYDRYLAICRPLHYPIIMTTTLCAKMAAACWTCGFLCPISEVILASQLPFCAYNEIQHIFCDFPPLLSLACKDTSANILVDFAINAFIILITFFFIMISYARIIGAVLKIKTASGRKKAFSTCASHLAVVLIFFGSIIFMYVRLKKSYSLTLDRTLAIVYSVLTPMVNPIIYSLRNKEIIKAIKRTIFQKGD

SEQ ID NO: 1849 - protein, 301 aa, Homo sapiens
LEVDNHTVTTRFILLGFPTRPAFQLLFFSIFLATYLLTLLENLLIILAIHSDGQLHKPMYFFLSHLSFLEMWYVTVISPKMLVDFLSHDKSISFNGCMTQLYFFVTFVCTEYILLAIMAFDRYVAICNPLRYPVIMTNQLCGTLAGGCWFCGLMTAMIKMVFIAQLHYCGMPQINHYFCDISPLLNVSCEDASQAEMVDFFLALMVIAIPLCVVVASYAAILATILRIPSAQGRQKAFSTCASHLTVVILFYSMTLFTYARPKLMYAYNSNKVVSVLYTVIVPLLNPIIYCLRNHEVKAAL

SEQ ID NO: 1850 - protein, 312 aa, Homo sapiens
ENFTIWSIFFLEGFSQYPGLEVVLFVFSLVMYLTTLLGNSTLILITILDSRLKTPMYLFLGNLSFMDICYTSASVPTLLVNLLSSQKTIIFSGCAVQMYLSLAMGSTECVLLAVMAYDRYVAICNPLRYSIIMNRCVCARMATVSWVTGCLTALLETSFALQIPLCGNLIDHFTCEILAVLKLACTSSLLMNTIMLVVSILLLPIPMLLVCISYIFILSTILRITSAEGRNKAFSTCGAHLTVVILYYGAALSMYLKPSSSNAQKIDKIISLLYGVLTPMLNPIIYSLRNKEVKDAMKKLLGKITLHQTHEH

SEQ ID NO: 1851 - protein, 721 aa, Homo sapiens
MFRLWLLLAGLCGLLASRPGFQNSLLQIVIPEKIQTNTNDSSEIEYEQISYIIPIDEKLYTVHLKQRYFLADNFMIYLYNQGSMNTYSSDIQTQCYYQGNIEGYPDSMVTLSTCSGLRGILQFENVSYGIEPLESAVEFQHVLYKLKNEDNDIAIFIDRSLKEQPMDDNIFISEKSEPAVPDLFPLYLEMHIVVDKTLYDYWGSDSMIVTNKVIEIVGLANSMFTQFKVTIVLSSLELWSDENKISTVGEADELLQKFLEWKQSYLNLRPHDIAYLLIYMDYPRYLGAVFPGTMCITRYSAGVALYPKEITLEAFAVIVTQMLALSLGISYDDPKKCQCSESTCIMNPEVVQSNGVKTFSSCSLRSFQNFISNVGVKCLQNKPQMQKKSPKPVCGNGRLEGNEICDCGTEAQCGPASCCDFRTCVLKDGAKCYKGLCCKDCQILQSGVECRPKAHPECDIAENCNGTSPECGPDITLINGLSCKNNKFICYDGDCHDLDARCESVFGKGSRNAPFACYEEIQSQSDRFGNCGRDRNNKYVFCGWRNLICGRLVCTYPTRKPFHQENGDVIYAFVRDSVCITVDYKLPRTVPDPLAVKNGSQCDIGRVCVNRECVESRIIKASAHVCSQQCSGHGVCDSRNKCHCSPGYKPPNCQIRSKGFSIFPEEDMGKSIMERASGKTENTWLLGFLIALPILIVTTAIVLARKQLKKWFAKEEEFPSS

SEQ ID NO: 1852 - protein, 424 aa, Homo sapiens
MKTSKASQRYRGIRRNASQCYLYQESLLLSNLDDSFSADETGDSNDPEQIFQNIQFQKDLMANIRCRPWTMGQKLRALRQAKNIVLKFEGRLTRTRGYQAAGAELWRKFARLACNFVVIFIPWEMRIKKIESHFGSGVASYFIFLRWLFGINIVLTIMTGAFIVIPELIAGQPFGSTARKTIPKEQVSSAQDLDTVWSLGGYLQYSVLFYGYYGRERKIGRAGYRLPLAYFLVGMAVFAYSFIILLKKMAKNSRTSLASASNENYTFCWRVFCAWDYLIGNPEAAESKTAAIVNSIREAILEEQEKKKSKNLAVTICLRIIANILVLLSLAGSIYLIYFVVDRSQKLEQSKKELTLWEKNEVSVVVSLVTMIAPSAFDLIAALEMYHPRTTLRFQLARVLVLYLGNLYSLIIALLDKVNSMSIE

SEQ ID NO: 1853 - protein, 322 aa, Homo sapiens
MDPTISTLDTELTPINGTEETLCYKQTLSLTVLTCIVSLVGLTGNAVVLWLLGCRMRRNAFSIYILNLAAADFLFLSGRLIYSLLSFISIPHTISKILYPVMMFSYFAGLSFLSAVSTERCLSVLWPIWYRCHRPTHLSAVVCVLLWALSLLRSILEWMLCGFLFSGADSAWCQTSDFITVAWLIFLCVVLCGSSLVLLIRILCGSRKIPLTRLYVTILLTVLVFLLCGLPFGIQFFLFLWIHVDREVLFCHVHLVSIFLSALNSSANPIIYFFVGSFRQRQNRQNLKLVLQRALQDASEVDEGGGQLPEEILELSGSRLEQ

SEQ ID NO: 1854 - protein, 174 aa, Homo sapiens
MSPEEWTYLVVLLISIPIGFLFKKAGPGLKRWGAAAVGLGLTLFTCGPHTLHSLVTILGTWALIQAQPCSVSGLKQTLLAESEALTSYSHRVFSAWDFGLCGDVHVRLRQRIILYELKVELEETVVRRQAAVRTLGQQARVWLVRVLLNLLVVALLGAAFYGVYWATGCTVELQ

SEQ ID NO: 1855 - protein, 308 aa, Homo sapiens
NVTSWRDFVFLGFSSSGELQLLLFALFLSLYLVTLTSNVFIIIAIRLDSHLHTPMYLFLSFLSFSETCYTLGIIPRMLSGLAGGDQAISYVGCAAQMFFSASWACTNCFLLAAMGFDRYVAICAPLHYASHMNPTLCAQLVITSFLTGYLFGLGMTLVIFHLSFCSSHEIQHFFCDTPPVLSLACGDTGPSELRIFILSLLVLLVSFFFITISYAYILAAILRIPSAEGQKKAFSTCASHLTVVIIHYGCASFVYLRPKASYSLERDQLIAMTYTVVTPLLNPIVYSLRNRAIQTALRNAFRGRLLGK

SEQ ID NO: 1856 - protein, 253 aa, Homo sapiens
AVGQIGNFLAYTAVPTVLVTPLGALGVPFGSILASYLLKEKLNILGKLGCLLSCAGSVVLIIHSPKSESVTTQAELEEKLTNPVFVGYLCIVLLMLLLLIFWIAPAHGPTNIMVYISICSLLGSFTVPSTKGIGLAAQDILHNNPSSQRALCLCLVLLAVLGCSIIVQFRYINKALECFDSSVFGAIYYVVFTTLVLLASAILFREWSNVGLVDFLGMACGFTTVSVGIVLIQVFKEFNFNLGEMNKSNMKTD

SEQ ID NO: 1857 - protein, 330 aa, Homo sapiens
RTKQGPRLSHGILYTAMEAGAEMDQQRGPSATPPIYFPSVEDGKPRRSLRCTPRPEQRGHRAARSQLRSDAASARRGFVARTRRELGPGRLWWHCSPPRGARAWLRREGPEIRARTRSSQDSPPIAGVGEAGAGAALQGYGAAGAEAAAERGPYLKAGLGVEVHGSPKLCNFTPGSPWAARRPAAISESLQLRLFVLGIGFFTLCFLMTSLGGQFSARRLGDSPFTIRTEVMGGPESRGVLRKMSDLLELMVKRMDALARLENSSELHRAGGDLHFPADSGASDAASVRRPVPQERWRWESVMAVEGGWPLRVPAMPSLVDSSLGSEEEE

SEQ ID NO: 1858 - protein, 517 aa, Homo sapiens
KAIAQSGTAISSWSVNYQPLKYTRLLAAKVGCDREDSAEAVECLRRKPSRELVDQDVQPARYHIAFGPVVDGDVVPDDPEILMQQGEFLNYDMLIGVNQGEGLKFVEDSAESEDGVSASAFDFTVSNFVDNLYGYPEGKDVLRETIKFMYTDWADRDNGEMRRKTLLALFTDHQWVAPAVATAKLHADYQSPVYFYTFYHHCQAEGRPEWADAAHGDELPYVFGVPMVGATDLFPCNFSKNDVMLSAVVMTYWTNFAKTGDPNQPVPQDTKFIHTKPNRFEEVVWSKFNSKEKQYLHIGLKPRVRDNYRANKVAFWLELVPHLHNLHTELFTTTTRLPPYATRWPPRPPAGAPGTRRPPPPATLPPEPEPEPGPRAYDRFPGDSRDYSTELSVTVAVGASLLFLNILAFAALYYKRDRRQELRCRRLSPPGGSGSGVPGGGPLLPAAGRELPPEEELVSLQLKRGGGVGADPAEALRPACPPDYTLALRRAPDDVPLLAPGALTLLPSGLGPPPPPP

SEQ ID NO: 1859 - protein, 305 aa, Homo sapiens
NSSMVTEFIFMGITQDPQMEIIFFVVFLIVYLVNVVGNIGMIILITTDTQLHTPMYFFLCNLSFVDLGYSSAIAPRMLADFLTNHKVISFSSCATQFAFFVGFVDAECYVLAAMAYGRFVAICRPLHYSTFMSKQVCLALMLGSYLAGLVSLVAHTTLTFSLSYCGSNIINHFFCEIPPLLALSCSDTYISEILLFSLCGFIEFSTILIIFISYTFILVAIIRMRSAEGRLKAFSTCGSHLTGITLFYGTVMFMYLRPTSSYSLDQDKWASVFYTVIIPMLNPLIYSLRNKDVKAAFKKLIGKKS

SEQ ID NO: 1860 - protein, 311 aa, Homo sapiens
MRLMKEVRGRNQTEVTEFLLLGLSDNPDLQGVLFALFLLIYMANMVGNLGMIVLIKIDLCLHTPMYFFLSSLSFVDASYSSSVTPKMLVNLMAENKAISFHGCAAQFYFFGSFLGTECFLLAMMAYDRYAAIWNPLLYPVLVSGRICFLLIATSFLAGCGNAAIHTGMTFRLSFCGSNRINHFYCDTPPLLKLSCSDTHFNGIVIMAFSSFIVISCVMIVLISYLCIFIAVLKMPSLEGRHKAFSTCASYLMAVTIFFGTILFMYLRPTSSYSMEQDKVVSVFYTVIIPVLNPLIYSLKNKDVKKALKKIL

SEQ ID NO: 1861 - protein, 299 aa, Homo sapiens
NKTEVTMFILTGFTDDFELQVFLFLLFFAIYLFTLIGNLGLVVLVIEDSWLHNPMYYFLSVLSFLDACYSTVVTPKMLVNFLAKNKSISFIGCATQMLLFVTFGTTECFLLAAMAYDHYVAIYNPLLYSVSMSPRVYVPLITASYVAGILHATIHIVATFSLSFCGSNEIRHVFCDMPPLLAISCSDTHTNQLLLFYFVGSIEIVTILIVLISCDFILLSILKMHSAKGRQKAFSTCGSHLTGVTIYHGTILVSYMRPSSSYASDHDIIVSIFYTIVIPKLNPIIYSLRNKEVKKAVKK

SEQ ID NO: 1862 - protein, 83 aa, Homo sapiens
SVIPVKDKKHLEVKLGELPSWILMQDRVIAAGIQRGYYWYYNKYINVKKGSISGLTMVLAGYMLFRYCLSYKELKHKRLCRYH

SEQ ID NO: 1863 - protein, 305 aa, Homo sapiens
MEGKNQTNISEFLLLGFSSWQQQQVLLFALFLCLYLTGLFGNLLILLAIGSDHCLHTPMYFFLANLSLVDLCLPSATVPKMLLNIQTQTQTISYPGCLAQMYFCMMFANMDNFLLTVMAYDRYVAICHPLHYSTIMALRLCASLVAAPWVIAILNPLLHTLMMAHLHFCSDNVIHHFFCDINSLLPLSCSDTSLNQLSVLATVGLIFVVPSVCILVSYILIVSAVMKVPSAQGKLKAFSTCGSHLALVILFYGAITGVYMSPLSNHSTEKDSAASVIFMVVAPVLNPFIYSLRNNELKGTLKKTL

SEQ ID NO: 1864 - protein, 336 aa, Homo sapiens
MSLVVTSMVAVIVYRLSVFATFASFMESDASLKQVKSFLTPQITTSLTGSCLNFIVILILNFFYEKISAWITKMEIPRTYQEYESSLTLKMFLFQFVNFYSSCFYVAFFKGKFVGYPGKYTYLFNEWRSEECDPGGCLIELTTQLTIIMTGKQIFGNIKEAIYPLALNWWRRRKARTNSEKLYSRWEQDHDLESFGPLGLFYEYLETVTQFGFVTLFVASFPLAPLLALINNIVEIRVDAWKLTTQYRRTVASKAHSIGVWQDILYGMAVLSVATNAFIVAFTSDIIPRLVYYYAYSTNATQPMTGYVNNSLSVFLIADFPNHTAPSEKRDFITCR

SEQ ID NO: 1865 - protein, 301 aa, Homo sapiens
LLNQTSLVTYFRLRGLSVNHKARIAMFSMFLIFYVLTLIGNVLIVITIIYDHRLHTPMYFFLSNLSFIDVCHSTVTVPKMLRDVWSEEKLISFDACVTQMFFLHLFACTEIFLLTVMAYDRYLAICQPLHYPVLMNGRLCTVLVAGAWVAGSMHGSIQATLTFRLPYCGPNQVDYFICDIRAVLRLACADTTVNELVTFVDVRVVAASCFMLILLSYANIVHAILKIRTADGRRRAFSTCGSHLIVVTVYYVPCIFIYLRAGSKDPLDGAAAVFYTVVTPLLNPLIYTLRNQEVKSALKRI

SEQ ID NO: 1866 - protein, 372 aa, Homo sapiens
MVVAGMVMMMVVVMMVVVVVMVVVSDDDGGGGDGDGGGGGGDGDGGGDGGDGGGGDDSGGGDGDDGGGDGGGGGGGDGGDGGGGGGDDDGGGGDGGDGGGGDGGGDGGGDGGGDGGVVVVDGGGGDGGGGGGCWWCGDVGVGGGCCGDVIVAMVVVVVIVVVVDNGDDGVDGGGDDGGDGGGGDGGGGGAANDGDGGGGGDGDNGDDGDDGGGDDGGDGGGGDGGDGDGGDGGGGGGDDDGGGGCDYDDDGDGGGGDGGDGDGGDGGGGGGDDDGGGGCDYDDDGDGGGGDGGDGDGGGGGGDDGGGGCDYDDDGDGGGGGGVFIEDGKGDMALEEKPLKKDSFGGGGGGDFTVGGAYQKADTSGSGRGCLK

SEQ ID NO: 1867 - protein, 151 aa, Homo sapiens
VASSILGVFVLTPSLAMMNIRFNHPLYGSFGTQIIHIGAFQGMALLVAKVFNKMACVLARMDKAVFPSLDDISKALDKQAFKYYPSTRGLTYTVLPSWVKNLAQYGKPIKNMCRDDPTYFAQQQKEGTALAIDSNSCFEIQLLSFMGLFIC

SEQ ID NO: 1868 - protein, 330 aa, Homo sapiens
MELGGAVTIFLALRLSCLLILIAWKRMDKAGKLPPGPTPILFLGHLLQVRTDATFQSFMKGEIQPCVHCVHGSRPVVVLCGHEAVKEALIDQADEFSGRGELASIKQNFQGHGVALANGERWRILRRFSLTILRDFGMGKQSIKERIQEEASYLLEEFQKTKIHEEINQVIGPHRLPRVDDRVKMPYTDVVIHEIQRLVDIVPMGVPHNIIQDTQFRGYLLPKGTDVFPLLGSVLKDPKYFRYPDAFYPQHFLDEQGRFKKNEAFVPFSSGKRICLGEAMARMELFLYFTSTLQNFSLCSLVPLVDIDITPKLSGFGNITPTYELCLVAR

SEQ ID NO: 1869 - protein, 200 aa, Homo sapiens
MANGMCSQGGFFSFSCVIFSGFIKGDLHNWQLTDADYKWAELGWSNDTHSSGSLGSGGFVPFGFGVILHGAATCFFAFVGFDGIATTGEEALHPHRLHPHRSIPLGTVTSIFICFLAYFGVSAALTLIVPLLPDMSREPLAGGFCPHWMGPHQICCGRRHPLCPFLQSMAEDRLLFCGLARIHAHTSTPVVATVVAGTLA

SEQ ID NO: 1870 - protein, 255 aa, Homo sapiens
VPLCPCRCPPSHPGPAPAVTAAPFAEEGALRVRGGEDRCSGRVELWHAGSWGTVCDDGWDLADAEVVCRQLGCGRAVAALGAAAFGPGSGPVWLDEVGCRGSEASLWGCPAERWGRGDRAHEEDAGVRCWAPFRTFWVVSVVLGSLLGLLLLGLMAFLILPRVTQAMQRGLGRSEVSPGEAIYDVIGEMPPAGLYEEIMEAEAVLQDEEDGSVVKVDTEAAAKLPTANFPRESQQDSEQGDRSQRVSAGQRASGQ

SEQ ID NO: 1871 - protein, 814 aa, Homo sapiens
AVLGLSLWALLHPGTGAPLCLSQQLRMKGDYVLGGLFPLGEAEEAGLRSRTRPSSPVCTRFSSNGLLWALAMKMAVEEINNKSDLLPGLRLGYDLFDTCSEPVVAMKPSLMFLAKAGSRDIAAYCNYTQYQPRVLAVIGPHSSELAMVTGKFFSFFLMPQVSYGASMELLSARETFPSFFRTVPSDRVQLTAAAELLQEFGWNWVAALGSDDEYGRQGLSIFSALAAARGICIAHEGLVPLPRADDSRLGKVQDVLHQVNQSSVQVVLLFASVHAAHALFNYSISSRLSPKVWVASEAWLTSDLVMGLPGMAQMGTVLGFLQRGAQLHEFPQYVKTHLALATDPAFCSALGEREQGLEEDVVGQRCPQCDCITLQNVSAGLNHHQTFSVYAAVYSVAQALHNTLQCNASGCPAQDPVKPWQLLENMYNLTFHVGGLPLRFDSSGNVDMEYDLKLWVWQGSVPRLHDVGRFNGSLRTERLKIRWHTSDNQVRPQACAQKPVSRCSRQCQEGQVRRVKGFHSCCYDCVDCEAGSYRQNPDDIACTFCGQDEWSPERSTRCFRRRSRFLAWGEPAVLLLLLLLSLALGLVLAALGLFVHHRDSPLVQASGGPLSHLPLTGCLSTLFLQAAEIFVESELPLSWADRLSGCLRGPWAWLVVLLAMLVEVALCTWYLVAFPPEVVTDWHMLPTEALVHCRTRSWVSFGLAHATNATLAFLCFLGTFLVRSQPGCYNRARGLTFAMLAYFITWVSFVPLLANVQVVLRPAVQMGALLLCVLGILAAFHLPRCYLLMRQPGLNTPEFFLGGGPGDAQGQNDG

SEQ ID NO: 1872 - protein, 254 aa, Homo sapiens
PWGPPRLPAASDVLQQVPSCQTGEGSATFATPREAPPAETDEPLPPPLITTIITTTLPITTTTAIATTIITTTITTIPITTITTTITTTITTTIITTVTTTTTITTTIIITITTTTTITTTITTTIITIITITTTIITITTITTTTTITTTIIITTTTITTAITTTITVTTTITTTISITITTATSTTITTITTTITTTIRLCGKQDLEWLSGSQSAIMIQEPLTKFQKILEEAHMRPKLKHTGSLLIQALKFI

SEQ ID NO: 1873 - protein, 169 aa, Homo sapiens
TFVSAFTVLCGARTDLPDRHVCCVFWLNIAAALIQILTAIVMVGWIMSIFWGMDMVILATGIVSVRGKLSQATRSRASHSSCEPTGAAGEIQGGPQVVRAASPSCSGKHCGRRHQSIREWGGDENAHREAGMLRQAPTGLAVPTAHRKGTPRLLGRATPGPVWLKSEGW

SEQ ID NO: 1874 - protein, 230 aa, Homo sapiens
MEKPRLYQKYKISRVWWRLPVIPATGEAEDNRLNPEGRGCGEPRSRHCTPAWTTTAKLHLKTIISLQPLNMYQMEPGVGSIRTSPALQSPPALTRGPSAWDTAIRKALSFGVGLGVLVLVCLFYHFVTLAPILQFASLPCLLEAGAQMSRHPVTTQVCVMPARLSLGSGISRNLLRLSVCHFTLLLPFRSLRPCPLSSRDMVLSYELWLLCDFYIAPPDSSGSGICKKAI

SEQ ID NO: 1875 - protein, 541 aa, Homo sapiens
SAQGRPFGHSEELQANKMPLISDFYPDAVMVAWKAEGTTITLGMKTATPSKQRNTTIAQHMWGPMRNESGETTGFRENVSMRQVQEPVSMFSIPFNLHTHGQNQPGQDWFYLSHKVTSIVPESTLLIILGLVLGSIIWVAKHITSFMMMSLIMLDASYFIPNWLFFGNLGTILLYKVISTMWNASTTILSLYDVSLSRLMGYLQIGLLDFLLFGSLITTVDPAAVLVVFEEVHGNEVLFIIIFRELLLNDSVIMVLYNVFQSFVTLGGDNVTSMNSVEGVVSFLVVSLGGMLVGMVFAFLLSLVTHLTKHVHIIEPGFMLAILAIIFCGICCHKYMKANISEQLAPTMCYTMKMLTSGTNPIFMSLGTLAMNLLIWTWNKAFIRLHWPSSSGTEAISVIHSWLLDCYWMVWLEIIGQVVMSCGGLHGAMAFILVILLNGNKVKEKNLFVSTTVNIFKWLKVKRSEHWEPKFHEKLQCHPLDHILLAIKDISRHIRHNDLKDMWSHFDRNFLSGVLMRRLAQKSPEGILNVFHALNLKDAIS

SEQ ID NO: 1876 - protein, 225 aa, Homo sapiens
SHLWPGGPGLQVHPMFGPEAYTLVLHLTQLITQAKHTARSISDQCVETPAGHSFLLWLGFGPTDTNGSYSAMTWARWGRTASRRWTSAWRRPWSTCARYSEYEQWGLFHGQPTLASGHRLNLHFLGSYLTLPWLLLAFFMASLFCIRPLTCALLFTLGYALYSLAMMLLTRWGSCTSPDGIGGGRPLQCRRSVGVQIDQQRQILDLDLGLQFLQQQYLELLAKLH

SEQ ID NO: 1877 - protein, 605 aa, Homo sapiens
AFMIPFLILLVLEGIPLLYLEFAIGQRLRRGSLGVWSSIHPALKGLGLASMLTSFMVGLYYNTIISWIMWYLFNSFQEPLPWSDCPLNENQTGYVDECARSSPVDYFWYRETLNISTSISDSGSIQWWMLLCLACAWSVLYMCTIRGIETTGKAVYITSTLPYVVLTIFLIRGLTLKGATNGIVFLFTPNVTELAQPDTWLDAGAQVFFSFSLAFGGLISFSSYNSVHGSASHSWGWRSGRDADAALGCVLTWDLIASRHDTGLVCSNNCEKDSVIVSIINGFTSVYVAIVVYSVIGFRATQRYDDCFSTNILTLINGFDLPEGNVTQENFVDMQQRCNASDPAAYAQLVFQTCDINAFLSEAVEGTGLAFIVFTEAITKMPLSPLWSVLFFIMLFCLGLSSMFGNMEGVVVPLQDLRVIPPKWPKEVLTGLICLGTFLIGFIFTLNSGQYWLSLLDSYAGSIPLLIIAFCEMFSVVYVYGVDRFNKDIEFMIGHKPNIFWQVTWRVVSPLLMLIIFLFFFVVEVSQELTYSIWDPGYEEFPKSQKISYPNWVYVVVVIVAGVPSLTIPGYAIYKLIRNHCQKPGDHQGLVSTLSTASMNGDLKY

SEQ ID NO: 1878 - protein, 194 aa, Homo sapiens
AHVGPGATECGQLLFKDQHEGARARVLLLGMLYTSAIVAFVLTILLQYCPFFLPQQGKDEAAVLQEESGKKHPLQLEQQLIQAEQHLDNLVAPLDPLFECVTTLAGAVRLLNMQLRTVKLLQDSKPDKGMVASEPEASIPFPEDLCIKEDEEEAADGQTWEEPINWSTETWKLATSWQVEQVLRRRCSKAVEKG

SEQ ID NO: 1879 - protein, 82 aa, Homo sapiens
IPVKDKKLLEVKLGELPSWILTRDFSPSGIFGAFRRSYYRYYNKYINVKKGSISGVTMVLACYVIFSYCLSYKHLKHERLRK

SEQ ID NO: 1880 - protein, 220 aa, Homo sapiens
ARSRTQWEMTWIGRQGSGIATPTNSLCIFAQLFLRIFIYALRDELGKPAGIAGTALSLLIRAELGQPGTLLGDDQIYNVIVTALTSVIIFFMVIPIMIGGFGNWLVPLLVKRFFPGVMEQEPDSVTFLSFTFLQCGSLTSPLRPPCTTELASEHPLPDVSLFWAPDIFHTLEGSRENSGANYIIVLPGVLQHKLPFTNEATESPRGQMARLVFMEHLSQV

SEQ ID NO: 1881 - protein, 176 aa, Homo sapiens
MCLELFHSSNVIDGLKLNAFAAVFTVLSGLLGMVAHMMYTQVFQVTVSLGPEDWRPHSWDYGWSFCLAWGSFTCCMAASVTTLNSYTKTVIEFRHKRKVFEQGYREEPTFIDPEAIKYFRERMEKRDGSEEDFHLDCRHERYPARHQPHMADSWPRSSAQEAPELNRQCWVLGHWV

SEQ ID NO: 1882 - protein, 304 aa, Homo sapiens
HSSDPTEFVLAGLPNLNSARVELFSVFLLVYLLNLTGNVLIVGVVRADTRLQTPMYFFLGNLSCLEILLTSVIIPKMLSNFLSRQHTISFAACITQFYFYFFLGASEFLLLAVMSADRYLAICHPLRYPLLMSGAVCFRVALACWVGGLVPVLGPTVAVALLPFCKQGAVVQHFFCDSGPLLRLACTNTKKLEETDFVLASLVIVSSLLITAVSYGLIVLAVLSIPSASGRQKAFSTCTSHLIVVTLFYGSAIFLYVRPSQSGSVDTNWAVTVITTFVTPLLNPFIYALRNEQVKEALKDMFRK

SEQ ID NO: 1883 - protein, 581 aa, Homo sapiens
EYKSMGMSNLTRLSEFILLGLSSRSEDQRPLFALFLIIYLVTLMGNLLIILAIHSDPRLQNPMYFFLSILSFADICYTTVIVPKMLVNFLSEKKTISYAECLAQMYFFLVFGNIDSYLLAAMAINRCVAICNPFHYVTVMNRRCCVLLLAFPITFSYFHSLLHVLLVNRLTFCTSNVIHHFFCDVNPVLKLSCSSTFVNEIVAMTEGLASVMAPFVCIIISYLRILIAVLKIPSAAGKHKAFSTCSSHLTVVILFYGSISYVYLQPLSSYTVKDRIATINYTVLTSVLNPFIYSLRNKDMKRGLQKLINKIKSQMSSDDPVEMSPFAIKKWLNTEFKILHAQRQAAARSLMKHTPPSRRPREGAMDELCSLNPRRQELLEARFIGVTLVKQQEWVNQQREDIERQRKILAKCKPPTANNSQTPSTNSEPKQRKNKGVNGAENDPFVRPNLPQLLTLAEYYEQEEMFKLRQGHLRKEEAEIQAELERLERVRNLHIRELRRINNEDNSQFKDHPMLNERYLLLHLLGRGGFSEVYKAFDLYEQSYASVKLHQLNKSWRDEKKENYYKHACSIEYTKNWITPE

SEQ ID NO: 1884 - protein, 295 aa, Homo sapiens
FLLLGFSRANISYTLLFFLFLAIYLTTILGNVTLVLLISWDSRLHSPMYYLLRGLSVIDMGLSTVTLPQLLAHLVSHYPTIPAARCLAQFFFFYAFGVTDTLVIAVMALDRYVAICDPLHYALVMNHQRCACLLALSWVVSILHTMLRVGLVLPLCWTGDAGGNVNLPHFFCDHRPLLRASCSDIHSNELAIFFEGGFLMLGPCALIVLSYVRIGAAILRLPSAAGRRRAVSTCGSHLTMVGFLYGTIICVYFQPPFQNSQYQDMVASVMYTAITPLANPFVYSLHNKDVKGALC

SEQ ID NO: 1885 - protein, 309 aa, Homo sapiens
MNETNHSRVTEFVLLGLSSSRELQPFLFLTFSLLYLAILLGNFLIILTVTSDSRLHTPMYFLLANLSFIDVCVASFATPKMIADFLVERKTISFDACLAQIFFVHLFTGSEMVLLVSMAYDRYVAICKPLHYMTVMSRRVCVVLVLISWFVGFIHTTSQLAFTVNLPFCGPNKVDSFFCDLPLVTKLACIDTYVVSLLIVADSGFLSLSSFLLLVVSYTVILVTVRNRSSASMAKARSTLTAHITVVTLFFGPCIFIYVWPFSSYSVDKVLAVFYTIFTLILNPVIYTLRNKEVKAAMSKLKSRYLKPS

SEQ ID NO: 1886 - protein, 31 aa, Homo sapiens
LGVLIILLSTMVTSITGLSTSAIATNGFVRG

SEQ ID NO: 1887 - protein, 297 aa, Homo sapiens
FYLLGIPSLPETFFLPVFFIFLLFYLLILMGNALILVAVVAEPSLHKPMYFFLINLSTLDILFTTTTVPKMLSLFLLGDRFLSFSSCLLQMYLFQSFTCSEAFILVVMAYDRYVAICHPLHYPVLMNPQTNATLAASAWLTALLLPIPAVVRTSQMAYNSIAYIYHCFCDHLAVVQASCSDTTPQTLMGFCIAMVVSFLPLLLVLLSYVHILASVLRISSLEGRAKAFSTCSSHLLVVGTYYSSIAIAYVAYRADLPLDFHIMGNVVYAILTPILNPLIYTLRNRDVKAAITKIMSQ

SEQ ID NO: 1888 - protein, 73 aa, Homo sapiens
VCVLERQIFDFLGYQWAPILANFVHIIIVILGLFGTIQYRPRYITGYAVWLVLWVTWNVFVICFYLEAGDLSK

SEQ ID NO: 1889 - protein, 654 aa, Homo sapiens
RCHTDCLEGLLSRTFQWLGWQVGAHPWIFLLAPLMLTAALGTGFLYLPKDEEEDLEEHYTPVGSPAKAERRFVQGHFTTNDSYRFSASRRSTEANFVSLLVVSYSDSLLDPATFAEVSKLDGAVQDLRVAREKGSQIQYQQVCARYRALCVPPNPILYAWQVNKTLNLSSISFPAYNHGRHPLYLTGFFGGYILGGSLGMGQLLLRAKAMRLLYYLKTEDPEYDVQSKQWLTHLLDQFTNIKNILALKKIEVVHFTSLSRQLEFEATSVTVIPVFHLAYILIILFAVTSCFRFDCIRNKMCVAAFGVISAFLAVVSGFGLLLHIGVPFVIIVANSPFLILGVGVDDMFIMISAWHKTNLADDIRERMSNVYSKAAVSITITTITNILALYTGIMSSFRSVQCFCIYTGMTLLFCYFYNITCFGAFMALDGKREVVCLCWLKKADPKWPSFKKFCCFPFGSVPDEHGTDIHPISLFFRDYFGPFLTRSESKYFVVFIYVLYIISSIYGCFHVQEGLDLRNLASDDSYITPYFNVEENYFSDYGPRVMVIVTKKVDYWDKDVRQKLENCTKIFEKNVYVDKNLTEFWLDAYVQYLKGNSQDPNEKNTFMNNIPDFLSNFPNFQHDINISSSNEIISSRGFIQTTDVSSSAKKKILL

SEQ ID NO: 1890 - protein, 66 aa, Homo sapiens
MSICIWVNVCVPMSICIRVNVCVPMSICIWVYVCVPVIICIWVNVCVPVIICMWVNVHEHKQLHSE

SEQ ID NO: 1891 - protein, 301 aa, Homo sapiens
NHSEMTDFILAGFRVRPELHILLFLLFLFVYAMILLGNVGMMTIIMTDPRLNTPMYFFLGNLSFIDLFYSSVIEPKAMINFWSENKSISFAGCVAQLFLFALLIVTEGFLLAAMAYDRFIAICNPLLYSVQMSTRLCTQLVAGSYFCGCISSVIQTSMTFTLSFCASRAVDHFYCDSRPLQRLSCSDLFIHRMISFSLSCIIILPTIIVIIVSYMYIVSTVLKIHSTEGHKKAFSTCSSHLGVVSVLYGAVFFMYLTPDRFPELSKVASLCYSLVTPMLNPLIYSLRNKDVQEALKKFLEK

SEQ ID NO: 1892 - protein, 179 aa, Homo sapiens
RQLKLPLLSDPISTRSKRSCRRAPGSQRSGRMLRSPHSNAPNSSLLKLVLIVSIAVSSAFQFAGVIHWISLVILSVFFSETVLRIVVLGIWDYIENKIEVFDGAVIILSLAPMVASTVANGPRSPWDAISLIIMLRIWRVKRVIDAYVLPVKLEMEMVIQQYEKAKVIQDEQLERLTQI

SEQ ID NO: 1893 - protein, 187 aa, Homo sapiens
TLCPPKGRQTSRHSSVQYSSEQQEILPANDSLAYSDSAGSFLKEVDRDIEQIVKCTDNKRENLNEVVSALTAQQMRFEPDNKNTQRKDPYYGADWGIGWWTAVVIMLIVGIITPVFYLLYYEILAKVDVSHHSTVDSSHLHSKITPPSQQREMENGIVPTKGIHFSQQDDHKLYSQDSQSPAAQQET

SEQ ID NO: 1894 - protein, 133 aa, Homo sapiens
AEEKWDEPWYNQKTEHQRNSSKILRFISDFLAFLVLYNFIIPISLYVTVEMQKFLGSFFIGWDLDLYHEESDQKAQVNTSDLNEELGQVEYVFTDKTGTLTENEMQFRECSINGMKYQEINGRLVPEGPTPDS

SEQ ID NO: 1895 - protein, 366 aa, Homo sapiens
QSYIFVESSHIRDALTWLSQGQKADGFFEGSGSLLNNAIKHAVVCSALSCLETAWSSTSEAQGSVVYTKALLAYAFALAGNKVKRRELLESLNREAMKEEDSIHWQRPGKLHEAKTLYSQPWAPSVEVEMTSYVLLAYLTVQPAPSSEDLSVASRIVKWITKQQNPQGGFSSTQDTVVALQALSKYGTATFTKSEKAALVTIKSSDTFSKDFQVDDGNCLVLQEVQLPEVPGEYSTTMSGSGCVYLQLQKQPQIQRTEVSTNHVPIYFEKLTHQTLHFSFFVEQDIQIKNLKPATVKAYDYYETGPCTQSTAKKENPKTLKSIVITHSVPEMNLQCMSYYHGNMSLTFFVSILCHLLVRILKEMEK

SEQ ID NO: 1896 - protein, 131 aa, Homo sapiens
MAPSLWKGLVGIGLFALAHAAFSAAQHRSYMRLTEKEDESLPIDIVLQTLLAFAVTCYGIVHIAGEFKDMDATSELKNKTFDTLRNHPSFYVFNHRGRVLFRPSDTANSSNQDALSSNTSLKLRKLESLRR

SEQ ID NO: 1897 - protein, 292 aa, Homo sapiens
MGCQVVGLAASAPAGTCVLTFLVIFADCSQPLDVILLLDGSSSFPASSFDEMKSFAKAFISKANIGPPLTQGSVLQYGSITTIDVPWNVAPEKAHLLSLVDVMQREGGPSQIGNVGDALGFAVRHLTSEMHGARPGASKAVVILVTDVSVDSVDAAADAARSNRVTVFPVGIGDRYDAAQLRILAGPAGDSNMVKLQQIEDLPTMVTLGNSFLHKLCSRFVRIRMDEDGNEKRPGDVWTLPDQCHTVTCQPDGQTLLKSHRVNCDRGPRPSCPNSQSPVKVEDTCGCRWTCP

SEQ ID NO: 1898 - protein, 138 aa, Homo sapiens
APPTGMPSRNTIKPGSAQLPAKHLPGNMGSSSFLVLMVSLVLVTLVAVEGVKEGIEKAGVCPADNVRCFKSDPPQCHTDQDCLGERKCCYLHCGFKCVIPVKELEEGGNKDEDVSRPYPEPGWEAKCPGSSSTRCPQK

SEQ ID NO: 1899 - protein, 608 aa, Homo sapiens
GCAAGSELAFVQELGDTVAVWEHPLVLPCQVEGEPPVSISWQRDRLALANESGVTLMPDGSLHLAALPSRRSLPSRAHEYHCVAQNRYGRLVSRQARVQLASLSRFHQHPESIEVERGGVARFQCLIQGVPEPSISWEHNGTALNTANHRVTLLPSGILHITSVSQTDMGTYRCVAWNVASTRHSQDAQLTLSVGPLRLLQEPEILSGPQNLTLTVHQTAVLECIATSHPWPLVSWSRLDGRSIGVEGIQVLDILDTGNLMISDVSVQHSGVYVCAANRPGTHVRRTAQGVLLVQAPEFVQWPQSLSKPPGSSAIFTCVAQGVPESRLVWLKNGKVLSPGNNIRLTHNNSTLMLAGVSVEDEAIYQCVAENSTGSNQASARLVVTGGPEPPVPRGLHAMALSTSAIRVSWEPPPSSRDIIGYVLHLRPVGEPSGPELQEAISKGTSEHVFSNLEPATAYTIHLRAYSAEGASQDSAPIFASTMGSTPAALGFSTKVLNATSVQASWELPPQLGPIQGFKFHRKLPAAHFQGPLLLASSVSSFLYTDLEPAALYDIKLQAFNGNGDGNSSARCVSFQGESSPLPGVVVGIHVGLAALIICLLCLFLGWR

SEQ ID NO: 1900 - protein, 431 aa, Homo sapiens
MMLRFSMCRGNDEGFAMEQIWLLLLLTIRVLPGSAQFNGYNCDANLHSRFPAERDISVYCGVQAITMKINFCTVLFSGYSETDLALNGRHGDSHCRGFINNNTFPAVVIFIINLSTLEGCGNNLVVSTIPGVSAYGNATSVQVGNISGYIDTPDPPTIISYLPGLLYKFSCSYPLEYLVNNTQLASSSAAISVRENNGTFVSTLNLLLYNDSTYNQQLIIPSIGLPLKTKVFAAVQATNLDGRWNVLMDYCYTTPSGNPNDDIRYDLFLSCDKDPQTTVIENGRSQRGRFSFEVFRFVKHKNQKMSTVFLHCVTKLCRADDCPFLMPICSHRERRDAGRRTTWSPQSSSGSAVLSAGPIITRSDETPTNNSQLGSPSMPPFQLNAITSALISGMVILGVTSFSLLLCSLALLHRKGPTSLVLNGIRNPVFD

SEQ ID NO: 1901 - protein, 744 aa, Homo sapiens
MDHAEENEILAATQRYYVERPIFSHPVLQERLHTKDKVPDSIADKLKQAFTCTPKKIRNIIYMFLPITKWLPAYKFKEYVLGDLVSGISTGVLQLPQGLAFAMLAAVPPIFGLYSSFYPVIMYCFLGTSRHISIGPFAVISLMIGGVAVRLVPDDIVIPGGVNATNGTEARDALRVKVAMSVTLLSGIIQFCLGVCRFGFVAIYLTEPLVRGFTTAAAVHVFTSMLKYLFGVKTKRYSGIFSVVYSTVAVLQNVKNLNVCSLGVGLMVFGLLLGGKEFNERFKEKLPAPIPLEFFAVVMGTGISAGFNLKESYNVDVVGTLPLGLLPPANPDTSLFHLVYVDAIAIAIVGFSVTISMAKTLANKHGYQVDGNQELIALGLCNSIGSLFQTFSISCSLSRSLVQEGTGGKTQLAGCLASLMILLVILATGFLFESLPQAVLSAIVIVNLKGMFMQFSDLPFFWRTSKIELTIWLTTFVSSLFLGLDYGLITAVIIALLTVIYRTQSPSYKVLGKLPETDVYIDIDAYEEVKEIPGIKIFQINAPIYYANSDLYSNALKRKTGVNPAVIMGARRKAMRKYAKEVGNANMANATVVKADAEVDGEDATKPEEEDGEVKYPPIVIKSTFPEEMQRFMPPGDNVHTVILDFTQVNFIDSVGVKTLAGIVKEYGDVGIYVYLAGCSAQVVNDLTRNRFFENPALWELLFHSIHDAVLGSQLREALAEQEASAPPSQEDLEPNATPATPEA

SEQ ID NO: 1902 - protein, 306 aa, Homo sapiens
EPWNLTGISEFLLLGLSEDPELQPVLPGLSLSMYLVTVLRNLLIILAVSSDSHLHTPMCFFLSNLCWADIGFTSAMVPKMIVDMQSHSRVISYAGCLTQMSFFVLFACIEDMLLTVMAYDRFVAICHPLHYPVIMNPHLGVFLVLVSFFLSLLDSQLHSWIVLQFTFFKNVEISNFVCDPSQLLNLACSDSVINSIFIYLDSIMFGFLPISGILLSYANNVPSILRISSSDRKSKAFSTCGSHLAVVCLFYGTGIGVYLTSAVSPPPRNGVVASVMYAVVTPMLNPFIYSLRNRDIQSALWRLRSR

SEQ ID NO: 1903 - protein, 307 aa, Homo sapiens
MEQSNYSVYADFILLGLFSNARFPWLLFALILLVFLTSIASNVVKIILIHIDSRLHTPMYFLLSQLSLRDILYISTIVPKMLVDQVMSQRAISFAGCTAQHFLYLTLAGAEFFLLGLMSYDRYVAICNPLHYPVLMSRKICWLIVAAAWLGGSIDGFLLTPVTMQFPFCASREINHFFCEVPALLKLSCTDTSAYETAMYVCCIMMLLIPFSVISGSYTRILITVYRMSEAEGRGKAVATCSSHMVVVSLFYGAAMYTYVLPHSYHTPEQDKAVSAFYTILTPMLNPLIYSLRNKDVTGALQKVVGR

SEQ ID NO: 1904 - protein, 303 aa, Homo sapiens
NQTFNSDFILLGIFNHSPTHTFLFFLVLAIFSVAFMGNSVMVLLIYLDTQLHTPMYFLLSQLFLMDLMLICSTVPKMAFNYLSGSKSISMAGCATQIFFYVSLLGSECFLLAVMSYDRYIAICHPLRYTNLMRPKICGLMTAFSWILGSMDAIIDAVATFSFSYCGSREIAHFFCDFPSLLILSCNDTSIFEKVLFICCIVMIVFPVAIIIASYARVILAVIHMGSGEGRRKAFTTCSSHLMVVGMYYGAGLFMYIRPTSDRSPMQDKLVSVFYTILTPMLNPLIYSLRNKEVTRALRKVLGK

SEQ ID NO: 1905 - protein, 308 aa, Homo sapiens
MEPQNTSTVTNFQLLGFQNLLEWQALLFVIFLLIYCLTIIGNVVIITVVSQGLRLHSPMYMFLQHLSFLEVWYTSTTVPLLLANLLSWGQAISFSACMAQLYFFVFLGATECFLLAFMAYDRYLAICSPLRYPFLMHRGLCARLVVVSWCTGVSTGFLPSLMISRLDFCGRNQINHFFCDLPPLMQLSCSRVYITEVTIFILSIAVLCICFFLTLGPYVFIVSSILRIPSTSGRRKTFSTCGSHLAVVTLYYGTMISMYVCPSPHLLPEINKIISVFYTVVTPLLNPVIYSLRNKDFKEAVRKVMRRK

SEQ ID NO: 1906 - protein, 298 aa, Homo sapiens
NASLVTAFILTGLPHAPGLDALLFGIFLVVYVLTVLGNLLILLVIRVDSHLHTPMYYFLTNLSFIDMWFSTVTVPKMLMTLVSPSGRAISFHSCVAQLYFFHFLGSTECFLYTVMSYDRYLAISYPLRYTSMMSGSRCALLATGTWLSGSLHSAVQTILTFHLPYCGPNQIQHYFCDAPPILKLACADTSANVMVIFVDIGIVASGCFVLIVLSYVSIVCSILRIRTSDGRRRAFQTCASHCIVVLCFFVPCVVIYLRPGSMDAMDGVVAIFYTVLTPLLNPVVYTLRNKEVKKAVLK

SEQ ID NO: 1907 - protein, 308 aa, Homo sapiens
LQSGNQTSVSHFILVGLHHPPQLGAPLFLAFLVIYLLTVSGNGLIILTVLVDIRLHRPMCLFLCHLSFLDMTISCAIVPKMLAGFLLGSRIISFGGCVIQLFSFHFLGCTECFLYTLMAYDRFLAICKPLHYATIMTHRVCNSLALGTWLGGTIHSLFQTSFVFRLPFCGPNRVDYIFCDIPAMLRLACADTAINELVTFADIGFLALTCFMLILTSYGYIVAAILRIPSADGRRNAFSTCAAHLTVVIVYYVPCTFIYLRPCSQEPLDGVVAVFYTVITPLLNSIIYTLCNKEMKAALQRLGGHKEV

SEQ ID NO: 1908 - protein, 305 aa, Homo sapiens
MNPANHSQVAGFVLLGLSQVWELRFVFFTVFSAVYFMTVVGNLLIVVIVTSDPHLHTTMYFLLGNLSFLDFCYSSITAPRMLVDLLSGNPTISFGGCLTQLFFFHFIGGIKIFLLTVMAYDRYIAISQPLHYTLIMNQTVCALLMAASWVGGFIHSIVQIALTIQLPFCGPDKLDNFYCDVPQLIKLACTDTFVLELLMVSNNGLVTLMCFLVLLGSYTALLVMLRSHSREGRSKALSTCASHIAVVTLIFVPCIYVYTRPFRTFPMDKAVSVLYTIVTPMLNPAIYTLRNKEVIMAMKKLWRRK

SEQ ID NO: 1909 - protein, 302 aa, Homo sapiens
RNGTVITEFILLGFPVIQGLQTPLFIAIFLTYILTLAGNGLIIATVWAEPRLQIPMYFFLCNLSFLEIWYTTTVIPKLLGTFVVARTVICMSCCLLQAFFHFFVGTTEFLILTIMSFDRYLTICNPLHHPTIMTSKLCLQLALSSWVVGFTIVFCQTMLLIQLPFCGNNVISHFYCDVGPSLKAACIDTSILELLGVIATILVIPGSLLFNMISYIYILSAILRIPSATGHQKTFSTCASHLTVVSLLYGAVLFMYLRPTAHSSFKINKVVSVLNTILTPLLNPFIYTIRNKEVKGALRKAM

SEQ ID NO: 1910 - protein, 513 aa, Homo sapiens
MSYGSIARGGGLGSRGPLGGPSRQGCQPLECARCWTEYGIRHFPCPSPESKLQNPCVGKDGEGDLGPAGTPIVPRARKRGPGVAPEGSRMPEPTSSPTIGPRKDSAAGPHGRMAGPSATRAKKRKPNFCPQETEVLVSKVSKHHQLLFGTGLLKAEPTRRYRVWSRILQAVNALGYCRRDVVDLKHKWRDLRAVVRRKLGDLRKAAHGPSPGSGKPQALALTPVEQVVAKTFSCQALPSEGFSLEPPRATQVDPCNLQELFQEMSANIFRINSSVTSLERSLQSLGTPSDTQELRDSLHTAQQETNKTIAASASSVKQMAELLRSSCPQERLQQERPQLDRLKTQLSDAIQCYGVVQKKIAEKSRALLPMAQRGSKQSPQAPFAELADDEKVFNGSDNMWQGQEQALLPDITEEDLEAIRLREEAILQMESNLLDVNQIIKDLASMVSEQGEAVDSIEASLEAASSHAEAARQLLAGASRHQLQRHKIKCCFLSAGVTALLVIIIIIATSVRK

SEQ ID NO: 1911 - protein, 305 aa, Homo sapiens
WVNQSYTDGFFLLGIFSHSQTDLVLFSAVMVVFTVALCGNVLLIFLIYLDAGLHTPMYFFLSQLSLMDLMLVCNIVPKMAANFLSGRKSISFVGCGIQIGFFVSLVGSEGLLLGLMAYDRYVAVSHPLHYPILMNQRVCLQITGSSWAFGIIDGVIQMVAAMGLPYCGSRSVDHFFCEVQALLKLACADTSLFDTLLFACCVFMLLLPFSIIMASYACILGAVLRIRSAQAWKKALATCSSHLTAVTLFYGAAMFMYLRPRRYRAPSHDKVASIFYTVLTPMLNPLIYSLRNGEVMGALRKGLDR

SEQ ID NO: 1912 - protein, 302 aa, Homo sapiens
VTEFILLGIPHTEGLEMTLFVLFLPFYACTLLGNVSILVAVMSSARLHTPMYFFLGNLSVFDMGFSSVTCPKMLLYLMGLSRLISYKDCVCQLFFFHFLGSIECFLFTVMAYDRFTAICYPLRYTVIMNPRICVALAVGTWLLGCIHSSILGSTIHTSFMLRLFLCKTNVINHYFCDLFPLLGLSCSSTYINELLVLVLSAFNILMPALTILASYIFIIASILRIHSTEGRSKAFSTCSSHILAVAVFFGSAAFMYLQPSSVSSMDQRKVSSVFYTTIVPMLNPLIYSLRNKDVKLAVKKIL

SEQ ID NO: 1913 - protein, 296 aa, Homo sapiens
MFGEIAKLISIYSYNHVLCHSYCFHPDVMKLSCSDTKINSALRLSAIISTAGVDSIFILLSYLLIIRSGLSIASPEERKKAFSTCISHITAVGIFYIPLISLSFVHRFGKHAPPYVPTPIANLYINSAIVTTDKKIKKQDQKCKPRLEKTLASHVLHHSYCFHPDIIQLSCSDNKINSVLGLTALIVTAGVDSIFILLSYILIIKTVLSIASPEERHKVFSTCISYIGAVAIFYIPLISLCFVHRFGKRAPPYAHTLMANAYLLIPPVMNPIIYSVKTKQIRRAIKKILFPKESVL

SEQ ID NO: 1914 - protein, 253 aa, Homo sapiens
LPSVSLLTAVALARLATRTRRPSYYYLLALTASDIIIQVVIVFAGFLLQGAVLARQVPQAVVRTANILEFAANHASVWIAILLTVDRYTALCHPLHHRAASSPGRTRRAIAAVLSAALLTGIPFYWWLDMWRDTDSPRTLDEVLKWAHCLTVYFIPCGVFLVTNSAIIHRLRRRGRSGLQPRVGKSTAILLGITTLFTLLWAPRVFVMLYHMYVAPVHRDWRVHLALDVANMVAMLHTAANFGLYCFVSKTFR

SEQ ID NO: 1915 - protein, 290 aa, Homo sapiens
FLLVGIPGLEHLHAWISIPFCFAYTLALLGNCTLLFIIRADAALHEPMYLFLAMLATIDLVLSSTTLPKMLAIFWFRDQEINFFACLVQMFFLHSFSIMESAVLLAMAFDRYVAICKPLHYTTVLTGSLITKIGMAAVAWAVTLMTPLPFLLRRFHYCRGPVIAHCYCEHMAVVRLACGDTSFNNIYGIAVAMFIVVLDLLFVILSYVFILQAVLQLASQEARYKAFGTCVSHIGAILSTYTPVVISSVMHRVARHAAPRVHILLAIFYLLFPPMVNPIIYGVKTKQIRE

SEQ ID NO: 1916 - protein, 300 aa, Homo sapiens
QNPTSFLLMGIPGPEASHFWIAFPFCSMYALAVLGNMVVLLVVHSEPVLHQPMYLFLCMLSTIDLVLCTSTVPKLLALFWAKDAEINFGACAAQMFFIHGFSAVESGILLAMAFDRYLAICWPLHYGSLLSPESVGKLGAAAVLRGLGLMTPLTCLLARLSYCSRVVAHSYCEHMAVVKLACGGTQPNNIYGITAATLVVGTDSICIAVSYALILRAVLGLSSKEARAKTFGTCGSHLGVILLFYTPGLFSFYTQRFGQHVPRHIHILLADLYLVVPPMLNPIIYGMKTKQIWDGALRLL

SEQ ID NO: 1917 - protein, 181 aa, Homo sapiens
MQGQGALKESHIHLPTEQPEASLVLQGQLAESSALGPKGALRPQAQSPDVPVSWWQGSGKRLSHRLPHICSQPPLGPFLPLTWPSCGFFGLGGAASASLGLEVLQDSVSTWARGPCCPVHPQSLTVVCMCACMCVCVHVCACVYVCMCVLVCMCACACMRAHRYFLMDCAGICSPHGPGTQ

SEQ ID NO: 1918 - protein, 413 aa, Homo sapiens
VLQLFLSRTAQRSALLSSGRLLRRLGLLLLPVLGFLAVWTVGALERGIQHAPLVIRGHTPSGRHFYLCHHDRWDYIMVVAELLLLCWGSFLCYATRAVLSAFHEPRYMGIALHNELLLSAAFHTARFVLVPSLHPDWTLLLFFFHTHSTVTTTLALIFIPKFWKLGAPPREEMVDEVCEDELDLQHSGSYLGSSIASAWSEHSLDPGDIRDELKKLYAQLEVHKTKEMAANNPHLPKKRGSSCQGLGRSFMRYLAEFPEALARQHSRDSGSPGHGSLPGSSRRRLLSSSLQEPEGTPALHKSRSTYDQRREQDPPLLDSLLRRKLAKKASRTESRESVEGPPALGFRSASAHNLTVGERLPRARPASLQKSLSVASSREKALLMASQAYLEETYRQAKEREERKKAKAAMASL

SEQ ID NO: 1919 - protein, 122 aa, Homo sapiens
LFTPANIGHPPNYEMLKEEQEVAVLGAPHNPAPPMSTVIPIHSENSVPDHVVWSLFNTHFMNSCCLGFIALAYSVKSRDKKMVGDLIRAQAYAFTAKCLNIWALIVRIITTILLSIIPVLIF

SEQ ID NO: 1920 - protein, 412 aa, Homo sapiens
PDGGWGWVVVLSAFFQSALVFGVLRSFGVFFVEFVAAFEEQAARVSWIASIGIAVQQFGSPVGSALSTKFGPRPVVMTGGILAALGMLLASFATSLTHLYLSIGLLSGSGWALTFAPTLACLSCYFSRRRSLATGLALTGVGLSSFTFAPFFQWLLSHYAWRGSLLLVSALSLHLVACGALLRPPSLAEDPAVGGPRAQLTSLLHHGPFLRYTVALTLINTGYFIPYLHLVAHLQDLDWDPLPAAFLLSVVAISDLVGRVVSGWLGDAVPGPVTRLLMLWTTLTGVSLALFPVAQAPTALVALAVAYGFTSGALAPLAFSVLPELIGTRRIYCGLGLLQMIESIGGLLGPPLSGYLRDVTGNYTASFVVAGAFLLSGSGILLTLPHFFCFSTTTSGPQDLVTEALDTKVPLP

SEQ ID NO: 1921 - protein, 296 aa, Homo sapiens
MGFTRSIPDYFAVNRTTHTVMQLHIQLGKHIGIEDAYFRNVPDCCSLHYVSNDEFLNGLVLGHALGTVRAANKLHVAMAHFGTTIVPSFLCRLGAPRTAARNYTSRQNAGARTRTGASAMATVLSRALKLPGKKSPDLGEYDPLTQADSDESEDDLVLNLQKNGGVKNGKSPLGEAPEPDSDAEVAEAAKPHLSEVTTEGYPSEPLGGLEQKAASSLVSYVRTSVFLLTLGISMILVLLCAFLIPCPPRDLHSTWSRHLGSQGGGDLSPLELADVNGDGLRDVLLSFVMSRNGSAV

SEQ ID NO: 1922 - protein, 302 aa, Homo sapiens
GYGVCSVGLEWLAYLLVPYSLGASATSLLGLLGLWLPRPVPLVAGAGVHLLLTFILFFWAPVPRVLQHSWILYVAAALWVVGSSLNKTGLSTLLGILYEDKERQDFIFTIYHWWQAVAIFTVYLGSSLHMKLALLLVTLVAATVSYLRMEQKLRRGVAPRQPRIPRPQHKVRGYRYLEEDNSDESDAEGDLGDGEEAEAEAPPAGPRPGPEPAGLGRRPCPYEQAQGAMGRRSTACLCQSQPGEGSDGAAGRDRGGCDRVAGPPWVLRARQTPEAHPPGACVGILGPPATTPASDRVHFRAT

SEQ ID NO: 1923 - protein, 255 aa, Homo sapiens
MHSKYPTLERDNSNSKEEQSSSWPINKLLPILGGKELLINKLVLHMRMTSKLTTYFKRVKEFDIENGTTKWQTVRRQKREWIKFAAACREGEDNSKRNPIAKIRSDCESNQKITYRISGVGIDRPPYGVFTINPRTGEINITSVVDREITPLFLIYCRALNSRGEDLERPLELRVKVMDINDNAPVFSQSVYTASIEENSDANTLVVKLCATDADEENHLNSKIAYKIVSQEPSGAPMFILNRYTGEVCTMSSFL

SEQ ID NO: 1924 - protein, 339 aa, Homo sapiens
MPKVMKDVVHPLGGEEPSMARAVVRSVGGFTLGLSLATAYGLLELLVEGHSPWGCLVGTLTLAAFLSLGMGFSRQVRATVLLLLPQAFSRQGRTLLLVAAFGLVLQGPCANTLRNFTRASEAVACGAELALNQTAEVLQRAKQPLVSALNKIKAIARKTKEVADRVRKFFRSIMDGVKHIARALRNVWQWLLHIGDVCNSELGNPYLKCARVFDDAKDSCMMVIPQAYHLCYVLMPFKLALCGLASLVQVFCVIPKYIQPFLRQTIGTPVIQLLNRVRQEFEFNMTATHHFSVDLNASRSLSQVAMDLHEAVSMKLHRVREALALMGFTTPLLLVLLYL

SEQ ID NO: 1925 - protein, 119 aa, Homo sapiens
MIVYALMVVSYFLVTGGIIYDVIVEPPSIGSMTDEHGHQRPVAFLAYRVNEQCIMEGLASSFLFTIGGLGFIFLDRWNAPNIPKLNRFLLLFIGFVCVLLSFFMARVFMRMKLPGYLMG

SEQ ID NO: 1926 - protein, 473 aa, Homo sapiens
MAQLEGYCFSAALSCTFLVSCLLFSAFSRALREPYMDEIFHLPQAQRYCEGHFSLSQWDPMITTLPGLYLVSVGVVKPAIWIFAWSEHVVCSIGMLRFVNLLFSVGNFYLLYLLFHKVQPRNKAASSIQRVLSTLTLAVFPTLYFFNFLYYTEAGSMFFTLFAYLMCLYGNHKTSAFLGFCGFMFRQTNIIWAVFCAGNVIAQKLTEAWKTELQKKEDRLPPIKGPFAEFRKILQFLLAYSMSFKNLSMLFCLTWPYILLGFLFCAFVVVNGGIVIGDRSSHEACLHFPQLFYFFSFTLFFSFPHLLSPSKIKTFLSLVWKHGILFLVVTLVSVFLVWKFTYAHKYLLADNRHYTFYVWKRVFQRYAILKYLLVPAYIFAGWSIADSLKSKPIFWNLMFFICLFIVIVPQKLLEFRYFILPYVIYRLNITLPPTSRLVCELSCYAIVNFITFYIFLNKTFQWPNSQDIQRFMW

SEQ ID NO: 1927 - protein, 300 aa, Homo sapiens
NNSLVTEFILAGLTDRPEFRQPLFFLFLVIYIVTMVGNLGLIILFGLNSHLHTPMYYFLFNLSFIDLCYSSVFTPKMLMNFVSKKNIISYVGCMTQLFFFLFFVISECYILTSMAYDRYVAICNPLLYKVTMSHQVCSMLTFAAYIMGLAGATAHTGCMLRLTFCSANIINHYLCDILPLLQLSCTSTYVNEVVVLIVVGINIMVPSCTILISYVFIVTSILHIKSTQGRSKAFSTCSSHVIALSLFFGSAAFMYIKYSSGSMEQGKVSSVFYTNVVPMLNPLIYSLRNKDVKVALRKAL

SEQ ID NO: 1928 - protein, 220 aa, Homo sapiens
SMSFLEIWYVSDITPKMLEGFLLQQKRISFVGCMTQLYFFSSLVCTECVLLASMAYDRYVAICHPLRYHVLVTPGLCLQLVGFSFVSGFTISMIKVCFISSVTFCGSNVLNHFFCDISPILKLACTDFSTAELVDFILAFIILVFPLLATMLSYAHITLAVLRIPSATGCWRAFFTCASHLTVVTVFYTALLFMYVRPQAIDSRSSNKLISVLYTVITPI

SEQ ID NO: 1929 - protein, 200 aa, Homo sapiens
QANRSQLRSPPGTESSEDASAPHCVHTRLTEEGSCLHSGDVHIQINAISKECAENTSSRNIRSDVHSCAHGWVHSHLQGHSHSEARLPDDTAAESGDHGSLFKWLQKSLPHILILSVKLVMQHITGISLGIGLLTTFMYANKSTVNQVFLSKLNFFISYFGPFELLGSTLDYWNYRLHSEILFHELKMPYLIGAFFHHAF

SEQ ID NO: 1930 - protein, 456 aa, Homo sapiens
KVTPSLIFAITIATIGSFQFGYNTGVINAPEMIIREFINTLKDKANTPPSEMLCLSLWCLSMAIFSIGCMISSFSVGLFVNSFDRRNSMLTVNLLAATGGCLMGLCKVAELVEILILAYLVIGLFCRLCTGFVPTYIGDISPIGLQGVFGTLNQLGIVVGILVAQIFDLEFILGSEDLWPVLLGFPISPAMLQSAALPFCPESPRFLLINRKEEENAKEILQWLWGTQDVSQDIQEMKDESARMAQEKQVTVLELFRVSSYRQPIIISIMLQLSQQLSVINTVFYYSTGIFKGAGVQEPICVTIGVGVVNTIFTIVSLFLVERAVRRTLHMIGLGGMAFCSILMSVCLLLKDECNGISFVCIGAILVFVVFFEIGPDHIPWFIVAELFSQGPGPAVMAVAGCSTWTSNFLVRLLFPSAAYYLGAYVFIIFTDFLITFLIFTFFKVPEMCYRTFKDI

SEQ ID NO: 1931 - protein, 108 aa, Homo sapiens
MEVSHSTLEPEASFPPPFLSFLVYSKFILSHLFFLNASSPLAFLFLHSLWTGPMLWPLIKAFSKKQSDSSNLHLVMQDVVKNMDSGGKYTLIPIHSLIYSFSKYLVNI

SEQ ID NO: 1932 - protein, 302 aa, Homo sapiens
MSNQTLVTEFILQGFSEHPEYRVFLFSCFLFLYSGALTGNVLITLAITFNPGLHAPMYFFLLNLATMDIICTSSIMPKALASLVSEESSISYGGCMAQLYFLTWAASSELLLLTVMAYDRYAAICHPLHYSSMMSKVFCSGLATAVWLLCAVNTAIHTGLMLRLDFCGPNVIIHFFCEVPPLLLLSCSSTYVNGVMIVLADAFYGIVNFLMTIASYGFIVSSILKVKTAWGRQKAFSTCSSHLTVVCMYYTAVFYAYISPVSGYSAGKSKLAGLLYTVLSPTLNPLIYTLRNKEVKAALRKL

SEQ ID NO: 1933 - protein, 511 aa, Homo sapiens
MGPGEQPCLRTLYGFITTQARASRNSLLTDVIAAYQIFCSRPPKGFEKYFPNGKKWGKNANEPKEVMGQKKESKPAATTHSSEGGGGGGGKRGGKKDDSHWWSRFQKGDFPWDDKDFRMFFVWTALFWGRVMFYFLLKRSGREVTWKELVNNYVSKGVVDRLKVVNERFVRVTFTPGRTPVDGQHVWFNTGSVDTFEWNLETLQQELGIEGENRVPVVYIAESDDSFLLSMLPAVLIIAFLLCTIRRGPAGIGRTGRGMGQLFSVRETKVLKDEIDVQFKDVAQYQDLGAKIPKGAILTGPPGTGKTLLAKATAGKANVPFITVSGSEFLEMFVESETYLPLLGRMPLASSSNVVGRKTGKGNFGGQNEQEDTLNQLLVEMDGFNTTTNVVILASTNQPDILDPALLRPGRFDRQIFIGLPDIKGRGSIFKVHLRPLKLDSTLEKEKLARKLASLTPGFSGADVANAIEQVIGRLEKKTQVLQPEEKTVAYHEAGHAVASWYLEPTDLLLK

SEQ ID NO: 1934 - protein, 307 aa, Homo sapiens
NQTSITEFLLLGFPIGPRIQMLLFGLFSLFYIFILLGNGTILGLISLDSRLHTPMYFFLSHLAVVDIACACSTVPQMLVNLLHPAKPISFAGCMTQMFLFLSFAHTECLLLVVMSYDRYVAICHPLRYSTIMTWKVCITLALTSWILGVLLALVHLVLLLPLSFCGPQKLNHFFCEIMAVLKLACADTHINEVMVLAGAVSVLVGAFFSTVISYVHILCAILKIQSGEGCQKAFSICSSHLCVVGLFYGTAIIMYVEPQYESPKEQKKYLLLFHSLFNPMLNPLIYSLRNKEVQGTLKRMLEKKRTS

SEQ ID NO: 1935 - protein, 306 aa, Homo sapiens
DSMDQRNYTRVKEFTFLGITQSRELSQVLFTFLFLVYMTTLMGNFLIMVTVTCESHLHTPMYFLLRNLSILDICFSSITAPKVLIDLLSETKTISFSGCVTQMFFFHLLGGADVFSLSVMAFDRYIAISKPLHYMTIMSRGRCTGLIVASWVGGFVHSIAQISLLLPLPFCGPNVLDTFYCDVPQVLKLACTDTFTLELLMISNNGLVSWFVFFFLLISYTVILMMLRSHTGEGRRKAISTCTSHITVVTLHFVPCIYVYARPFTALPTDTAISVTFTVISPLLNPIIYTLRNQEMKLAMRKLKRR

SEQ ID NO: 1936 - protein, 321 aa, Homo sapiens
MNQTLNSSGTVESALNYSRGSTVHTAYLVLSSLAMFTCLCGMAGNSMVIWLLGFRMHRNPFCIYILNLAAADLLFLFSMASTLSLETQPLVNTTDKVHELMKRLMYFAYTVGLSLLTAISTQRCLSVLFPIWFKCHRPRHLSAWVCGLLWTLCLLMNGLTSSFCSKFLKFNEDRCFRVDMVQAALIMGVLTPVMTLSSLTLFVWVRRSSQQWRRQPTRLFVVVLASVLVFLICSLPLSIYWFVLYWLSLPPEMQVLCFSLSRLSSSVSSSANPVIYFLVGSRRSHRLPTRSLGTVLQQALREEPELEGGETPTVGTNEMGA

SEQ ID NO: 1937 - protein, 308 aa, Homo sapiens
MKIANNTVVTEFILLGLTQSQDIQLLVFVLILIFYLIILPGNFLIIFTIRSDPGLTAPLYLFLGNLAFLDASYSFIVAPRMLVDFLSEKKVISYRGCITQLFFLHFLGGGEGLLLVVMAFDRYIAICRPLHCSTVMNPRACYAMMLALWLGGFVHSIIQVVLILRLPFCGPNQLDNFFCDVRQVIKLACTDMFVVELLMVFNSGLMTLLCFLGLLASYAVILCHVRRAASEGKNKAMSTCTTRVIIILLMFGPAIFIYMCPFRALPADKMVSLFHTVIFPLMNPMIYTLRNQEVKTSMKRLLSRHVVC

SEQ ID NO: 1938 - protein, 341 aa, Homo sapiens
LGQVIFGPLSDRIGRRPILLRGATAFVIASLGAAWSSTAPAFVAFRLLQAVGASAMLVATFATVRDVYANRPEGVVIYGLFSSMLAFVPALGPIAGALIGEFLGWQAIFITLAILAMLALLNAGFRWHETRPLDQVKTRRSVLPIFASPAFWVYTVGFSAGMGTFFVFFSTAPRVLIGQAEYSEIGFSFAFATVALVMIVTTRFAKSFVARWGIAGCVARGMALLVCGAVLLGIGELYGSPSFLTFILPMWVVAVGIVFTVSVTANGALAEFDDIAGSAVAFYFCVQSLIVSIVGTLAVALLNGDTAWPVICYATEMAVLVTPGLVLLRLRGAATEKSPVV

SEQ ID NO: 1939 - protein, 243 aa, Homo sapiens
IYRTGFIGPKGQRIFLILRGVLGSTAMMLIYYAYQTMSLADATVITFSSPVFTSIFAWICLKEKYSPWDALFTVFTITGVILIVRPPFLFGSDTSGMEESYSGHLKGTFAAIGSAVFAASTLVILRKMGKSVDYFLSIWYYVVLGLVESVIILSVLGEWSLPYCGLDRLFLIFIGLFGLGGQIFITKALQIEKAGPVAIMKTMDVVFAFIFQIIFFNNVPTWWTVGGALCVVASNVGAAIRKW

SEQ ID NO: 1940 - protein, 202 aa, Homo sapiens
LGLISDSFHMFFDSTAILAGLAASVISKWRDNDAFSYGYVRAEVLAGFVNGLFLIFTAFFIFSEGVERALAPPDVHHERLLLVSILGFVVNLIGIFVFKHGGHGHSHGSGHGHSHSLFNGALDQAHGHVDHCHSHEVKHGAAHSHDHAHGHGHFHSHGVFLHILADTLGSIGVIASAIMMQNFGLMIADPICSILIAILIVV

SEQ ID NO: 1941 - protein, 304 aa, Homo sapiens
MENSTEVTEFILLGLTDDPNLQIPLLLAFLFIYLITLLGNGGMMVIIHSDSHLHTPMYFFLSNLSLVDLGYSSAVAPKTVAALRSGDKAISYDGCAAQFFFFVGFATVECYLLASMAYDRHAAVCRPLHYTTTMTAGVCALLATGSYVSGFLNASIHAAGTFRLSFCGSNEINHFFCDIPPLLALSCSDTRISKLVVFVAGFNVFFTLLVILISYFFICITIQRMHSAEGQKKVFSTCASHLTALSIFYGTIIFMYLQPNSSQSVDTDKIASVFYTVVIPMLNPLIYSLRNKEVKSALWKILNK

SEQ ID NO: 1942 - protein, 302 aa, Homo sapiens
MKKEQDSNVTEFVLLGLSSSWELQLFLFLLFLFFYIAIVLGNLLIVVTVQAHAHLLQSPMYYFLGHLSFIDLCLSCVTVPKMLGDFLQQGKSISFSGCLAQIYFLHFLGASEMFLLTVMAYDRYVAICNPLRYLTVMNPQLCLWLVLACWCGGFIHSIMQVILVIQLPFCGPNELDNFYCDVPQVIKLACMDTYVVEVLVIANSGLLSLVCFLVLLFSYAIILITLRTHFCQGQNKVFSTCASHLTVVSLIFVPCVFIYLRPFCSFSVDKIFSLFYTVITPMLNPLIYTLRNTDMKTAMKKL

SEQ ID NO: 1943 - protein, 312 aa, Homo sapiens
MENKTEVTQFILLGLTNDSELQVPLFITFPFIYIITLVGNLGIIVLIFWDSCLHNPMYFFLSNLSLVDFCYSSAVTPIVMAGFLIEDKVISYNACAAQMYIFVAFATVENYLLASMAYDRYAAVCKPLHYTTTMTTTVCARLAIGSYLCGFLNASIHTGDTFSLSFCKSNEVHHFFCDIPAVMVLSCSDRHISELVLIYVVSFNIFIALLVILISYTFIFITILKMHSASVYQKPLSTCASHFIAVGIFYGTIIFMYLQPSSSHSMDTDKMAPVFYTMVIPMLNPLVYSLRNKEVKSAFKKVVEKAKLSVGW

SEQ ID NO: 1944 - protein, 307 aa, Homo sapiens
MHQGNQTTITEFILLGFFKQDEHQNLLFVLFLGMYLVTVIGNGLIIVAISLDTYLHTPMYLFLANLSFADISSISNSVPKMLVNIQTKSQSISYESCITQMYFSIVFVVIDNLLLGTMAYDHFVAICHPLNYTILMRPRFGILLTVISWFLSNIIALTHTLLLIQLLFCNHNTLPHFFCDLAPLLKLSCSDTLINELVLFIVGLSVIIFPFTLSFFSYVCIIRAVLRVSSTQGKWKAFSTCGSHLTVVLLFYGTIVGVYFFPSSTHPEDTDKIGAVLFTVVTPMINPFIYSLRNKDMKGALRKLINR

SEQ ID NO: 1945 - protein, 313 aa, Homo sapiens
MAERNYTVVTEFFLTAFTEHLQWRVPLFLIFLSFYLATMLGNTGMILLIRGDRRLHTPMYFFLSHLSLVDICYSSAIIPQMLAVLWEHGTTISQARCAAQFFLFTFFASIDCYLLAIMAYDRYTAVCQPLLYVTIITEKARWGLVTGAYVAGFFSAFVRTVTAFTLSFCGNNEINFIFCDLPPLLKLSCGDSYTQEVVIIVFALFVMPACILVILVSYLFIIVAILQIHSAGGRAKTFSTCASHLTAVALFFGTLIFMYLRDNTGQSSEGDRVVSVLYTVVTPMLNPLIYSLRNKEVKEATRKALSKSKPARR

SEQ ID NO: 1946 - protein, 82 aa, Homo sapiens
MPHQTLSQTKKNPSLISCFIFIGAGSTGAAWYVLCLASFSPDVSWARNNNPEPWNKLSPNDQYKSYSVNVDYSKLKKEGPDF

SEQ ID NO: 1947 - protein, 296 aa, Homo sapiens
MNNVTEFILLGLTHNPELQKFLFVMFLITYLITLAGNLLISVIIFISPALGSPMYLFLSYLSIIDIFYSSSIAPKMIFDLISENNTISFNGCMTQLFTEHFFAAAETILLSVMAYDCYVAICKPLHYATIMTQSMCGFLMVVAGILGFVHGGIQTLFIAQLPFCGPNVIDHFMCDLVPLLELACTDTHTLGPLIAANSGSLCFLIFSILDASYVIILCSLRSHSSEGHLKALSSCASHIFTVILFFVPCSYLYLRPLTSFPTDKAVTVFCTLFTPMLNPLIYTVKNKAVKNVIKKL

SEQ ID NO: 1948 - protein, 402 aa, Homo sapiens
LLRLQLALFVNSLLLIGSLYIWRSTVSNLCHSPAAESTCFQLWKVVVLAFLALAHSSFFTMFFLVAEEPYLFSLAAYSCLGAYIIMLFFLFILSGMEQAYQLLAWRSGRVVGSLEKTRKLVLRPALAVGVTAVLSVAGILNAAQPPAVKTVEVPIHQLPASMNNLKIVLLSDIHLGPTVGRTKMEMFVRMVNVLEPDITVIVGDLSDSEASVLRTAVAPLGQLHSHLGAYFVTGNHEYYTSDVSNWFALLESLHVQPLHNENVKISATRAQRGGGGSGSGSEDEDWICLAGVDDIEADILHYSGHGMDLDKALEGCSPDHTIILLAHQPLAAKRALQARPDINLILSGHTHAGQIFPLNVAAYLLNPFFAGLYQVAQATFVYVSPGTAYYGIPMRLGSRAEI

SEQ ID NO: 1949 - protein, 425 aa, Homo sapiens
MLTNIILCFSMVYMTFYIVEFLGMSGTLALAAVGLNLDSLTFKPKIELVITKFLRIFSSVYEHLIYAFFGIVIGCGELSHYEFHTIPFIFILFTTVNLVRLLTILLVSPILMHSNYEYNWRWGVVITWSGIKGVFNLLWAPDVYNLAERKVEVPQMFILYVQVISLLTMGINSYVMTQSARKLDLCVLSLPRQMILQNATQHIQEIVQNTITLFKTEKILTNVNWTLVEDKTRIEYIPFSHVSHNDMKTESTTDEALMEEARLHVAAIQMSSFEKQRNNGILEIEAARILIGAAKCYYSIQGKCYEMTFSVQIIILKRKYFQQCWNTLEFFILVIGIIDIFCVYFVKLRPDNLALIQLTVIMGYLRIIRFLPLFKIIVPILIRIADVQIKKRLSLMYSITKGYIKSQEDAKLLIKQIAVCESIYQ

SEQ ID NO: 1950 - protein, 303 aa, Homo sapiens
RNNLTRPSEFILLGLSSRPEDQKPLFAVFLPIYLITVIGNLLIILAIRSDTRLQTPMYFFLSILSFVDICYVTVIIPKMLVNFLSETKTISYSECLTQMYFFLAFGNTDSYLLAAMAIDRYVAICNPFHYITIMSHRCCVLLLVLSFCIPHFHSLLHILLTNQLIFCASNVIHHFFCDDQPVLKLSCSSHFVKEITVMTEGLAVIMTPFSCIIISYLRILITVLKIPSAAGKRKAFSTCGSHLTVVTLFYGSISYLYFQPLSNYTVKDQIATIIYTVLTPMLNPFIYSLRNKDMKQGLAKLMH

SEQ ID NO: 1951 - protein, 161 aa, Homo sapiens
SWLTGIITATTHASLIFSLPFRSHPIIPHFLCDILPVLRLASAGKHRSEISVMTATIVFIMIPFSLIVTSYIRILGAILAMASTQSRRKVFSTCSSHLLVVSLFFGTASITYIRPQAGSSVTTDRVLSLFYTVITPMLNPIIYTLRNKDVRRALRHLVKRQ

SEQ ID NO: 1952 - protein, 314 aa, Homo sapiens
MERQNQSCVVEFILLGFSNYPELQGQLFVAFLVIYLVTLIGNAIIIVIVSLDQSLHVPMYLFLLNLSVVDLSFSAVIMPEMLVVLSTEKTTISFGGCFAQMYFILLFGGAECFLLGAMAYDRFAAICHPLNYQMIMNKGVFMKLIIFSWALGFMLGTVQTSWVSSFPFCGLNEINHISCETPAVLELACADTFLFEIYAFTGTFLIILVPFLLILLSYIRVLFAILKMPSTTGRQKAFSTCAAHLTSVTLFYGTASMTYLQPKSGYSPETKKVMSLSYSLLTPLLNLLIYSLRNSEMKRALMKLWRRRVVLHTI

SEQ ID NO: 1953 - protein, 294 aa, Homo sapiens
MPSLPTLIFIAIFCLESLAAMLQNGFLVTMLGREWVRCRMLSTSDMIVACLAASRFCLHGVAMVNNLLASLDFSRAVPYMNIFWDLFNALTLWFTALLAAFYCVKISSFSHPTFAWLKWRNSRLVPKLIKGSLIICGLEVISSATGNILFGQRKVSLSSYRNETLVYRVQASFQLYFFLYEGFVWSILFLLFLVSTVLLIVSLCWQLGKKALLTTSGFREPSVQAHIKALLALLSFAMLFISYFLSLVFSAAGIFPPLDFKFWVWESVIYLCAAVHPIILLFSNCRLRAVLKSR

SEQ ID NO: 1954 - protein, 347 aa, Homo sapiens
MGDELAPCPVGTTAWPALIQLISKTPCMPQAASNTSLGLGDLRVPSSMLYWLFLPSSLLAAATLAVSPLLLVTILRNQRLRQEPHYLLPANILLSDLAYILLHMLISSSSLGGWELGRMACGILTDAVFAACTSTILSFTAIVLHTYLAVIHPLRYLSFMSHGAAWKAVALIWLVACCFPTFLIWLSKWQDAQLEEQGASYILPPSMGTQPGCGLLVIVTYTSILCVLFLCTALIANCFWRIYAEAKTSGIWGQGYSRARGTLLIHSVLITLYVSTGVVFSLDMVLTRYHHIDSGTHTWLLAANSEVLMMLPRAMLPYLYLLRYRQLLGMVRGHLPSRRHQAIFTIS

SEQ ID NO: 1955 - protein, 86 aa, Homo sapiens
MILFSACCICGLIGGILNFQFLRAVTKKTSSLYPLHLASMSLACIGIGGCTLSSWLTCRLASYEQRRMFSEREHSLHHSHEMAEKV

SEQ ID NO: 1956 - protein, 338 aa, Homo sapiens
MAGSHPYFNLPDSTHPSPPSTPPSLHWHQRCQPSDATNGLLVALLGGGLPAGFVGPLSRMAYQASNLPSLELVICRCLFHLPIALLLKLRGDPLLGPPDIRGRTCFCALLNVLNIGCAYSAVQVVPTGNAATVRKHSSTVCSAILTLCLESQVLSGYDWCGLLGSILGLIIIVGPGLWTLQEGTTGVYTGLGYVQAFLGGLALSLGLLVYRSLHFPSCLPTVAFLSGLVGLLGSVPGLFVLQSPVLPSDLLSWSCVGAVGILTLVSFTCVGYAVTKAHPALVCAVLHSEVVMALILQYFMLHETVAPSDIMGAGVVLGSIAIITARNLICERTGKVEE

SEQ ID NO: 1957 - protein, 372 aa, Homo sapiens
LSFPFSIIFSTVLYCGEVAFGLYMFEIYRKANDTFWMSFTISFIIVGAILDQIILMFFNKDLRRNKAALLFWHILLLGPIVRCLHTIRNYHKWLKNLKQEKEETQVSITKRNTMLEREIAFSIRDNFMQQKAFKYMSVIQAFLGSVPQLILQMYISLTIREWPLNRALLMTFSLLSVTYGAIRCNILAIQISNDDTTIKLPPIEFFCVVMWRFLEVISRVVTLAFFIASLKLKSLPVLLIIYFVSLLAPWLEFWKSGAHLPGNKENNSNMVGTVLMLFLITLLYAAINFSCWSAVKLQLSDDKIIDGRQRWGHRILHYSFQFLENVIMILVFRFFGGKTLLNCCDSLIAVQLIISYLLATGFMLLFYQYLYP

SEQ ID NO: 1958 - protein, 325 aa, Homo sapiens
VSLFNYVFLISWAFALPYAKLRRLASSVCTVWTCVIIVCKMLYQLQTIKPENFSVNCSLPNENQTNIPFNELNKSLLYSAPIDPTEWVGLRKSSPLLVYLRNNLLMLAILAFEVTIYRHQEYYRGRNNLTAPVSRTIFHDITRLHLDDGLINCAKYFINYFFYKFGLETCFLMSVNVIGQRMDFYAMIHACWLIAVLYRRRRKAIAEIWPKYCCFLACIITFQYFICIGIPPAPCRDYPWRFKGASFNDNIIKWLYFPDFIVRPNPVFLVYDFMLLLCASLQRQIFEDENKAAVRIMAGDNVEICMNLDAASFSQHNPVPDFIHC

SEQ ID NO: 1959 - protein, 310 aa, Homo sapiens
MKNHTRQIEFILLGLTDNSQLQIVIFLFLLLNCVLSMIGNFTIIALILLDSQLKTPMYFFLRNFSFLEISFTTACIPRFLITIVTREKTISCNGCISQLFFYIFLGVTEFFLLAALSYDRYVAICKPLRYMSIMSNKVCYQLVFSSWVTGFLIIFTPLILGLNLDFCASNIIDHFICDISLILQLSCSDTHLLELIAFLLAVMTLIVTLFLVILSYSYIIKTILKFPSAQQKKKAFSTCSSHMIVVSITYGSCMFIYIKPSANERVALSKGVTVLNTSVAPLLNPFIYTLRNQQVKQAFKAVFRKIFSAS

SEQ ID NO: 1960 - protein, 311 aa, Homo sapiens
  VARIANT 304: Xaa = Any Amino Acid
RRSTMKNRTMFGEFILLGLTNQPELQVMIFIFLFLTYMLSILGNLTIITLTLLDPHLQTPMYFFLRNFSFLEISFTSIFIPRFLTSMTTGNKVISFAGCLTQYFFAIFLGATEFYLLASMSYDRYVAICKPLHYLTIMSSRVCIQLVFCSWLGGFLAILPPIILMTQVDFCVSNILNHYYCDYGPLVELACSDTSLLELMVILLAVVTLMVTLVLVTLSYTYIIRTILRIPSAQQRTKAFSTCSSHMIVISLSYGSCMFMYINPSAKEGGAFNKGIAVLITSVTPLLNPFIYTLRNQQVKQAFXDSVKKIV

SEQ ID NO: 1961 - protein, 301 aa, Homo sapiens
MEVSNMTTVTVFILLGLSNNPQVQALLFVLFLVIYLLTLLGNLLMVLVISTDSHLCTPMYFFLRQLSFLDAFYSSIIVPKLLENLLSKGETISFLECFTQISLVIFSGATEACLLSVMAYDRFQAMCHPLLYVVIINRRVCAGLVGASWAIGMGTGLINTLLLAQQHFCGPNVIHSFACELPPVLLLTCSDPCASIVSILTTMSVLGLGTLVLLLGSYSCIIMTALRINSATGRSKIFSTCSSHFLVVTIFYTSGVLRYMIPASGSALEQVLSVQYSVITPLLNPLIYSLKSQEVKVALRR

SEQ ID NO: 1962 - protein, 308 aa, Homo sapiens
GNHSTITEFLLLGLSADPNIRALLFVLFLGIYLLTIMENLMLLLMIRADSCLHKPMYFFLSHLSFVDLCFSSVIVPKMLENLLSQRKTISVEGCLAQVFFVFVTAGTEACLLSGMAYDRHAAICRPLLYGQIMGKQLYMHLVWGSWGLGFLDALINVLLAVNMVFCEAKIIHHYSYEMPSLLPLSCSDISRSLIALLCSTLLHGLGNFLLVFLSYTRIISTILSISSTSGRSKAFSTCSAHLTAVTLYYGSGLLRHLMPNSGSPIELIFSVQYTVVTPMLNSLIYSLKNKEVKVALKRTLEKYLQYTR

SEQ ID NO: 1963 - protein, 132 aa, Homo sapiens [sequence omitted]

SEQ ID NO: 1964 - protein, 244 aa, Homo sapiens
VCTAFTAEHATHGHVKMHHAYTNVVGLGDSSTWRLPCLNRYVYMFLAPFLLPIATPLVAVERLRKVELGTALRTLALISLGLYSHYWLLLNVSGFKNPSSALGCMFLTRSLLAHPYLHVNIFQHIGLPMFSRDNKPRRIHMMSLGVLNLARLPVLDWAFGHSIISCHVEHHLFPRLSDNMCLKPLLIGPLLPIFHQVKPVVSQFLREKQLPYNEDSYLARFQLFLRRYEEFMVQAPPITELVGL

SEQ ID NO: 1965 - protein, 301 aa, Homo sapiens
NGSIVTEFILVGFQQSSTSTRALLFALFLALYSLTMAMNGLIIFITSWTDPKLNSPMYFFLGHLSLLDVCFITTTIPQMLIHLVVRDHIVSFVCCMTQMYFVFCVGVAECILLAFMAYDRYVAICYPLNYVPIISQKVCVRLVGTAWFFGLINGIFLEYISFREPFRRDNHIESFFCEAPIVIGLSCGDPQFSLWAIFADAIVVILSPMVLTVTSYVHILATILSKASSSGRGKTFSTCASHLTVVIFLYTSAMFSYMNPHSTHGPDKDKPFSLLYTIITPMCNPIIYSFRNKEIKEAMVR

SEQ ID NO: 1966 - protein, 297 aa, Homo sapiens
NHSVVTEFIILGLTKKPELQGIIFLFFLIVYLVAFLGNMLIIIAKIYNNTLHTPMYVFLLTLAVVDIICTTSIIPKMLGTMLTSENTISYAGCMSQLFLFTWSLGAEMVLFTTMAYDRYVAICFPLHYSTIMNHHMCVALLSMVMAIAVTNSWVHTALIMRLTFCGPNTIDHFFCEIPPLLALSCSPVRINEVMVYVADITLAIGDFILTCISYGFIIVAILRIRTVEGKRKAFSTCSSHLTVVTLYYSPVIYTYIRPASSYTFERDKVVAALYTLVTPTLNPMVYSFQNREMQAGI

SEQ ID NO: 1967 - protein, 305 aa, Homo sapiens
MGLGNESSLMDFILLGFSDHPRLEAVLFVFVLFFYLLTLVGNFTIIIISYLDPPLHTPMYFFLSNLSLLDICFTTSLAPQTLVNLQRPKKTITYGGCVAQLYISLALGSTECILLADMALDRYIAVCKPLHYVVIMNPRLCQQLASISWLSGLASSLIHATFTLQLPLCGNHRLDHFICEVPALLKLACVDTTVNELVLFVVSVLFVVIPPALISISYGFITQAVLRIKSVEARHKAFSTCSSHLTVVIIFYGTIIYVYLQPSDSYAQDQGKFISLFYTMVTPTLNPIIYTLRNKDMKEALRKLL

SEQ ID NO: 1968 - protein, 73 aa, Homo sapiens
VSALERQIFDFLGFQWAPILGNFLHIIVVILGLFGTIQYRPRYIMVYTVWTALWVTWNVFIICFYLEVGGLSK

SEQ ID NO: 1969 - protein, 233 aa, Homo sapiens
MEPNATFTTQLTATPERLLRLISAGVCGLILLVGLSANGLMLLVVGRGPGSPHPLHSLTHSLMMNITPSDLLFLACVVPVLLLSFLQHNWWLGPAICTISQATNTATTFCIFYSMVATALLRHVAVARPDLAFPAGWGTLLLLCGAMWALGLTESLPNWLFQRVAVEEETAGAPKTQACLLLLSPAGTSCYISLLGALAFLPCTLGLGCSFSHVGWLLWTQPQGPMGESIQEH

SEQ ID NO: 1970 - protein, 208 aa, Homo sapiens
MEMTKLFSYIVIKNVYYPQVSFGISANTFLLLFHIFTFAYTHRLKPIDMTISHLPLIHILLLFTQAILVSSDLFESWNIQNNDLKCKIITFLNRVMRGVSICTTCLLSVLQAITISPSTSFLEKFKHISANHTLGFILFSWVLNMFITNNLLLFIVPTPNRIGASLLFVTEHCYVLPMSYTHRSLFFILMVLRDVIFIGLMVLSSGYG

SEQ ID NO: 1971 - protein, 565 aa, Homo sapiens
WPPLLFLLLLPGGSGGSCPAVCDCTSQPQAVLCGHRQLEAVPGGLPLDTELLDLSGNRLWGLQQGMLSRLSLLQELDLSYNQLSTLEPGAFHGLQSLLTLRLQGNRLRIMGPGVFSGLSALTLLDLRLNQIVLFLDGAFGELGSLQKLEVGDNHLVFVAPGAFAGLAKLSTLTLERCNLSTVPGLALARLPALVALRLRELDIGRLPAGALRGLGQLKELEIHLWPSLEALDPGSLVGLNLSSLAITRCNLSSVPFQALYHLSFLRVLDLSQNPISAIPARRLSPLVRLQELRLSGACLTSIAAHAFHGLTAFHLLDVADNALQTLEETAFPSPDKLVTLRLSGNPLTCDCRLLWLLRLRRHLDFGMSPPACAGPHHVQGKSLKEFSDILPPGHFTCKPALIRKSGPRWVIAEEGGHAVFSCSGDGDPAPTVSWMRPHGAWLGRAGRVRVLEDGTLEIRSVQLRDRGAYVCVVSNVAGNDSLRTWLEVIQVEPPNGTLSDPNITVPGIPGPFFLDSRGVAMVLAVGFLPFLTSVTLCFGLIALWSKGKGRVKHHMTFDFVAPRPS

SEQ ID NO: 1972 - protein, 116 aa, Homo sapiens
QKTEEELDEGDHKEPDETLSERLWGLKEMFRRGASPRAEPLSISPLFVAQKMYWFSRAALWIGTSFFMILVLVVIFETEKLQMGQPQQQQQRQIRLRRHTAVQKNARGPPSLPGKI

SEQ ID NO: 1973 - protein, 162 aa, Homo sapiens
IFINSLIAALTIGGQQLFSSSTFSCPCQVGKNFYYGSAFLVIPALILLVAGFALRSQMWTITGEYCCSCAPPYRRISPLECKLACLRFFSITGRAVIAPLTWLAVTLLTGTYYECAASEFASVDHYPMFDNVSASKREEILAGFPCCRSAPSDVILVRDEIA

SEQ ID NO: 1974 - protein, 298 aa, Homo sapiens
MAENQVNDPKDQELNQKQGFCTTKSKNTFSWGYERRNHRDTPSPFCFCHASATTATGLTISSFFSHLFDKKQMHILMVGLDAAGKTTIPYELKLGEIVTTIPTVGCNVEAVDYKNIRFTVWDAGGQDRIRPLRKYYFPNTQYLIFVVDSNNRERIKEVAETGVEVLAARTTDLLIPRVTQHRSEETMCVLKGELSTCLPGMIVMQCKINLVSSAAAGSPAVLENSQQLSRMRQQLLLLRVMHVPHAPSFGDLPFAPAPAGTGMCLWRGLCYCCPRGRVLDDGILHTRIFHFGACHPAK

SEQ ID NO: 1975 - protein, 163 aa, Homo sapiens
GQYWKPSEPPNPTNERYTLHQNWARFSYFYKEQPLDLIKNYYGEKIGIYFVFLGFYTEMLFFAAVVGLACFIYGLLSMEHNTSSTEICDPEIGGQMIMCPLCDQVCDYWRLNITLFLEFWKQRQARLEYEWDLVDFEEEQQQLQLRPEFEAMCKHRKLNAVTK

SEQ ID NO: 1976 - protein, 437 aa, Homo sapiens
HSLPSYTALLDLSHNNLSRLRAEWTPTRLTQLHSLLLSHNHLNFISSEAFSPVPNLRYLDLSSNQLRTLDEFLFSDLQVLEVLLLYNNHIMAVDRCAFDDMAQLQKLYLSQNQISRFPLELVKEGAKLPKLTLLDLSSNKLKNLPLPDLQKLPAWIKNGLYLHNNPLNCDCELYQLFSHWQYRQLSSVMDFQEDLYCMNSKKLHNVFNLSFLNCGEYKERAWEAHLGDTLIIKCDTKQQGMTKVWVTPSNERVLDEVTNGTVSVSKDGSLLFQQVQVEDGGVYTCYAMGETFNETLSVELKVHNFTLHGHHDTLNTAYTTLVGCILSVVLVLIYLYLTPCRCWCRGVEKPSSHQGDSLSSSMLSTTPNHDPMAGGDKDDGFDRRVAFLEPAGPGQGQNGKLKPGNTLPVPEATGKGQRRMSDPESVSSVFSDTPIVV

SEQ ID NO: 1977 - protein, 213 aa, Homo sapiens
EPRLTRWLRRGSGILAHLVALGFTIFLTALSRPGTNMRLTGSLLCSQFCLCMAEAILLFSPEHSLFFFCSRKARIRLHWAGQTLAILCAALGLGFIISSRTRSELPHLVSWHSWVGALTLLATAVQALCGLCLLCPRAARVSRVARLKLYHLTCGLVVYLMATVTVLLGMYSVWFQAQIKGAAWYLCLALPVYPALVIMHQISRSYLPRKKME

SEQ ID NO: 1978 - protein, 147 aa, Homo sapiens
MEILYHVLFLVLECPNLKLKKPPWLHMLSAMTVCSGGGVFLITGGIIYDVIVEPPSVGSMTDEHGHQRPVAFFAYRVNGQYIMEGLASSFLFTMGGLGFIILDQLNAPNIPKLNRFLLLFIGFVCVLLSIFMARVFMRMKLPSYLMG

SEQ ID NO: 1979 - protein, 305 aa, Homo sapiens
MEQDNTTLLTEFVLTGLTYQPEWKMPLFLVFLVIYLITIVWNLGLIALIWNDPQLHIPMYFFLGSLAFVDAWISSTVTPKMLVNFLAKNRMISLSECMIQFFSFAFGGTTECFLLATMAYDRYVAICKPLLYPVIMNNSLCIRLLAFSFLGGFLHALIHEVLIFRLTFCNSNIIHHFYCDIIPLFMISCTDPSINFLMVFILSGSIQVFTIVTVLNSYTFALFTILKKKSVRGVRKAFSTCGAHLLSVSLYYGPLIFMYLRPASPQADDQDMIDSVFYTIIIPLLNPIIYSLRNKQVIDSFTKMV

SEQ ID NO: 1980 - protein, 597 aa, Homo sapiens
PAPGLGAGEIMARLFSPRPPPSEDLFYETYYSLSQQYPLLLLLLGIVLCALAALLAVAWASGRELTSDPSFLTTVLCALGGFSLLLGLASREQRLQRWTRPLSGLVWVALLALGHAFLFTGGVVSAWDQVSYFLFVIFTAYAMLPLGMRDAAVAGLASSLSHLLVLGLYLGPQPDSRPALLPQLAANAVLFLCGNVAGVYHKALMERALRATFREALSSLHSRRRLDTEKKHQEHLLLSILPAYLAREMKAEIMARLQAGQGSRPESTNNFHSLYVKRHQGVRYEEEWLEGRGLWAKTLALLTQSALCSVLYADIVGFTRLASECSPKELVLMLNELFGKFDQIAKEHECMRIKILGDCYYCVSGLPLSLPDHAINCVRMGLDMCRAIRKLRAATGVDINMRVGVHSGSVLCGVIGLQKWQYDVWSHDVTLANHMEAGGVPGRVHITGATLALLAGAYAVEDAGMEHRDPYLRELGEPTYLVIDPRPTGLISSVPEIEFLGPSGGWREKEEVSVVFTVSPYVPQAEEEDEKGTAGGLLSSLEGLKMRPSLLMTRYLESWGAAKPFAHLSHGDSPVSTSTPLPEKTLASFSTQWSLDR

SEQ ID NO: 1981 - protein, 171 aa, Homo sapiens
NLRNEEQVAIIQAGTVLALCEKVEASGISVLTPCPSFPAPYKKLQKGYLEEELDYRKQALDQAYLKIQDLEATLYTALQQEPGRRAGEALSEGQREDLQAAVEKVRRQILRQSREFDSQILRERMELLQQAQQRIRELEDKLEFQKRHLKELEEKFLFLFLFFSLAFILWP

SEQ ID NO: 1982 - protein, 309 aa, Homo sapiens
MPTVNHSGTSHTVFHLLGIPGLQDQHMWISIPFFISYVTALLGNSLLIFIILTKRSLHEPMYLFLCMLAGADIVLSTCTIPQALAIFWFRAGDISLDRCITQLFFIHSTFISESGILLVMAFDHYIAICYPLRYTTILTNALIKKICVTVSLRSYGTIFPIIFLLKRLTFCQNNIIPHTFCEHIGLAKYACNDIRINIWYGFSILMSTVVLDVVLIFISYMLILHAVFHMPSPDACHKALNTFGSHVCIIILFYGSGIFTILTQRFGRHIPPCIHIPLANVCILAPPMLNPIIYGIKTKQIQEQVVQFL

SEQ ID NO: 1983 - protein, 181 aa, Homo sapiens
PSHSSSCNNFQSKEGRGQRTATMPVLSHQGSKCLQVPAAGFPRNLRADPWALLAAGEELRLASYLARMAMVPGATLRRLLSVVLPTASQPQLLALLDSATERHVDHAAESDGGAEQADVGRRRKHQSWWQALDGKLRGDLISRGLEKMLWARKRKQRLALFTFTPMPFSLAVAITHLQTEG

SEQ ID NO: 1984 - protein, 652 aa, Homo sapiens
NETETKIFLQFYDQTGEVVLNKFMEATWNYVTNITRKNQEEMIKDMERSQFMIYFGTQAHLFKVTQFKDPDVNGMLSKLQNIDKAALSKDELREYNELLAYLEMTYSMAQVCLNEGPCLSLESELEVMATSRDKEELLWAWQGWQDAVGRQICTTFEHYVELSNKAAQLNGYKDMGALWHSKYESDTLEQDLERLFQELRPLYLNLHTYVRRALHRHYGPELIDLRGPIPAHLLENTLAQSWVNILDPVLPFLKKIPEDVTKIMKVQHWKPEKMLEEAETFFTSLALPPAPPSFWKKLMLMRPTDGREVECHISAWNFYQDDDFRIKKCAEVTTEDPLSIFHEMGHQYFLQYKNLSIIFRAGANPAFEEAVGSVITLSASSHKHLLNIGLLSLAPGLRGCLLTALTLFPEDEVNFLMHIALEKIAFIPFGYLMDLLRWKVFDGTIWKDIYNQEWWNLRLKYQGLCPAIPHSEEDFDPGAKFHFSAGVPYIRYFLSLVLQFQFHETLCKASGHMGPLHQCDIYNSKIAGKLLGDALKLGSSKPWPEVLKMLTGESEVSTNVFMTYFKPLLTWLVTEHQQGDILGWPDFSWVPLQFYPPYETPMSSTEKDTDKVTFLSLKLDPNQAKFGYWVLLALGFVMSLVVLGLACRLQSL

SEQ ID NO: 1985 - protein, 557 aa, Homo sapiens
GWRNFHPQCLQRCNTPGGFLLHYCLLAVTQGIVVNGLVNISISTVEKRYEMKSSLTGLISSSYDISFCLLSLFVSFFGERGHKPRWLAFAAFMIGLGALVFSLPQFFSGEYKLGSLFEDTCVTTRNSTSCTSSTSSLSNYLYVFILGQLLLGAGGTPLYTLGTAFLDDSVPTHKSSLYIGTGYAMSILGPAIGYVLGGQLLTIYIDVAMGTDVTEDDPRWLGAWWIGFLLSWIFAWSLIIPFSCFPKHLPGKHAFFKTREVYFNCRPNLMKNAVFMCLVLSTSSEALITTGFATFLPKFIENQFGLTSSFAATLGGAVLIPGAALGQILGGFLVSKFRMTCKNTMKFALFTSGVALTLSFVFMYAKCENEPFAGVSESYNGTGELGNLIAPCNANCNCSRSYYYPVCGDGVQYFSPCFAGCSNPVAHRKPKVYYNCSCIERKTEITSTAETFGFEAKAGKCETHCAKLPIFLCIFFIVIIFTFMAGTPITVSILRSVILNCSLLLYISPIILLGTIPGPIIFGFTIDSTCILWDINDCGIKGACWIYDNIKMAHMLV

SEQ ID NO: 1986 - protein, 374 aa, Homo sapiens
MPTLNTSASPPTFFWANASGGSVLSADDAPMPVKFLALRLMVALAYGLVGAIGLLGNLAVLWVLSNCARRAPGPPSDTFVFNLALADLGLALTLPFWAAESALDFHWPFGGALCKMVLTATVLNVYASIFLITALSVARYWVVAMAAGPGTHLSLFWARIATLAVWAAAALVTVPTAVFGVEGEVCGVRLCLLRFPSRYWLGAYQLQRVVLAFMVPLGVITTSYLLLLAFLQRRQRRRQDSRVVARSVRILVASFFLCWFPNHVVTLWGVLVKFDLVPWNSTFYTIQTYVFPVTTCLAHSNSCLNPVLYCLLRREPRQALAGTFRDLRLRLWPQGGGWVQQVALKQVGRRWVASNPRESRPSTLLTNLDRGTPG

SEQ ID NO: 1987 - protein, 196 aa, Homo sapiens
HTQDLKDVTNNVHYENYGIRKLAAVTYHGVDNKKNKGQFAKSPLAQMEEERREQVAKIKKMEMEMEQVFEMKVKEKVQKLKDSEAELGRRCRRGPMPVMPIPRGLCSFHGPHTTCLHAVCGPVGASHLARTKYNSFEYLGVSVLLCFQHKLWVLLLLLGRWRVEFRLVNELLIYSIHVTMLLDGGLGWCLMVFVDM

SEQ ID NO: 1988 - protein, 84 aa, Homo sapiens
VPVKDKKLLEVKLGELPSWILMWDFSPSGLDGAFQRGYYWYYNKYINVKKGSISGFTMVLAGYMLFIYCLSYKELKHERLCKYH

SEQ ID NO: 1989 - protein, 419 aa, Homo sapiens
MLAAAFADSNSSSMNVSFAHLHFAGGYLPSDSQDWRTIIPALLVAVCLVGFVGNLCVIGILLHNAWKGKPSMIHSLILNLSLADLSLLLFSAPIRATAYSKSVWDLGWFVCKSSDWFIHTCMAAKSLTIVVVAKVCFMYASDPAKQVSIHNYTIWSVLVAIWTVASLLPLPEWFFSTIRHHEGVEMCLVDVPAVAEEFMSMFGKLYPLLAFGLPLFFASFYFWRAYDQCKKRGTKTQNLRNQIRSKQVTVMLLSIAIISALLWLPEWVAWLWVWHLKAAGPAPPQGFIALSQVLMFSISSANPLIFLVMSEEFREGLKGVWKWMITKKPPTVSESQETPAGNSEGLPDKVPSPESPASIPEKEKPSSPSSGKGKTEKAEIPILPDVEQFWHERDTVPSVQDNDPIPWEHEDQETGEGVK

SEQ ID NO: 1990 - protein, 170 aa, Homo sapiens
MEAPGPRALRTALCGGCCCLLLCAQLAVAGKGARGFGRGALIRLNIWPAVQGACKQLEVCEHCVEGDRARNLSSCMWEQCRPEEPGHCVAQSEVVKEGCSIYNRSEACPGKGVLAPKPSCMGSPPVPEAHSPGFDGASFIGGVVLVLSLQAVAFFVLHFLKAKDSTYQTL

SEQ ID NO: 1991 - protein, 301 aa, Homo sapiens
MASRYVAVGMILSQTVVGVLGSFSVLLHYLSFYCTGCRLRSTDLIVKHLIVANFLALRCKGVPQTMAAFGVRYFLNALGCKLVFYLHRVGRGVSIGTTCLLSVFQVITVSSRKSRWAKLKEKAPKHVGFSVLLCWIVCMLVNIIFPMYVTGKWNYTNITVNEDLGYCSGGGNNKIAQTLRAMLLSFPDVLCLGLMLWVSSSMVCILHRHKQRVQHIDRSDLSPRASPENRATQSILILVSTFVSSYTLSCLFQVCMALLDNPNSLLVNTSALMSVCFPTLSPFVLMSCDPSVYRFCFAWKR

SEQ ID NO: 1992 - protein, 395 aa, Homo sapiens
MTHTLYPTPFALYPINISAAWHLGPLPVSCFVSNKYQRSLAFGATTGLRVLVVVVPQTQLSFLSSLCLVSLFLHSLVSAHGEKPTKPVGLDPTLFQVVVGILGNFSLLYYYMFLYFRGYKPRSTDLILRHLTVADSLVILSKRIPETMATFGLKHFDNYFGCKFLLYAHRVGRGVSIGSTCLLSVFQVITINPRNSRWAEMKVKAPTYIGLSNILCWAFHMLVNAIFPIYTTGKWSNNNITKKGDLGYCSAPLSDEVTKSVYAALTSFHDVLCLGLMLWASSSIVLVLYRHKQQVQHICRNNLYPNSSPGNRAIQSILALVSTFALCYALSFITYVYLALFDNSSWWLVNTAALIIACFPTISPFVLMCRDPSRSRLCSICCRRNRRFFHDFRKM

SEQ ID NO: 1993 - protein, 188 aa, Homo sapiens
VKPPTVIGQFHTLFFGSIRIFFLGVLGFAVYGNEALHFICDPDKREVNLFCYNQFRPITPQALQLVIVLVPGALFHLYAACKSINQECILQKPIYTIIYILSVLLRISLAAIAFWLQIYLFGFQVKSLYLCDARSLGENMIIRCMVPEHFEKTIFLIAINTFTTITILLFVAEIFEIIFRRLYFPFRQ

SEQ ID NO: 1994 - protein, 85 aa, Homo sapiens
LEIVLSVLLLVLFIISIVLIVLLAKESLKSTAPDPGTTGTPDPGTTGTPDPGTTGTTHARTTGPPDPGTTGTTPVSAECPVVNEL

SEQ ID NO: 1995 - protein, 319 aa, Homo sapiens
HRMAETLQLNSTFLHPNFFILTGFPGLGSAQTWLTLVFGPIYLLALLGNGALPAVVWIDSTLHQPMFLLLAILAATDLGLATSIAPGLLAVLWLGPRSVPYAVCLVQMFFVHALTAMESGVLLAMACDRAAAIGRPLHYPVLVTKACVGYAALALALKAVAIVVPFPLLVAKFEHFQAKTIGHTYCAHMAVVELVVGNTQATNLYGLALSLAISGMDILGITGSYGLIAHAVLQLPTREAHAKAFGTCSSHICVILAFYIPGLFSYLTHRFGHHTVPKPVHILLSNIYLLLPPALNPLIYGARTKQIRDRLLETFTFRK

SEQ ID NO: 1996 - protein, 302 aa, Homo sapiens
VSEFLLICFPNFQSWQHWLSLPLSLLFLLAMGANTTLLITIQLEASLHQPLYYLLSLLSLLDIVLCLTVIPKVLAIFWYDLRSISFPACFLQMFIMNSFLPMESCTFMVMAYDRYVAICHPLRYPSIITNQFVAKASVFIVVRNALLTAPIPILTSLLHYCGENVIENCICANLSVSRLSCDNFTLNRIYQFVAGWTLLGSDLFLIFLSYTFILRAVLRFKAEGAAVKALSTCGSHFILILFFSTILLVVVLTNVARKKVPMDILILLNVLHHLIPPALNPIVYGVRTKEIKQGIQKLLQRG

SEQ ID NO: 1997 - protein, 296 aa, Homo sapiens
FLLVGIPGLEESQHWIALPLGILYLLALVGNVTILFIIWMDPSLHQSMYLFLSMLAAIDLVLASSTAPKALAVLLVHAHEIGYIVCLIQMFFIHAFSSMESGVLVAMALDCYVAICHPLHHSTILHPGVIGCIGMVVLVRGLLLLIPFPILLGKLIFCQATIIGHAYCEHMAVVKLACSETTVNRAYGLTMALLVIGLDVLAIGVSYAHILQAVLKVPGSEARLKAFSTCGSHICVILVFYVPGIFSFLTHRFGHHVPHHVHVLLATWYLLMPPALNPLVYGVKTQQIRQRVLRVF

SEQ ID NO: 1998 - protein, 313 aa, Homo sapiens
MTLPSNNSTSPVFEFFLICFPSFQSWQHWLSLPLSLLFLLAMGANATLLITIYLEASLHQPLYYLLSLLSLLDIVLCLTVIPKVLAIFWFDLRSISFPACFLQVFIMNSFLTMESCTFMIMAYDRYVAICKPLQYSSIITDQFVARAAIFVVARNGLLTMPIPILSSRLRYCAGHIIKNCICTNVSVSKLSCDDITLNQSYQFVIGWTLLGSDLILIVLSYFFILKTVLRIKGEGDMAKALGTCGSHFILILFFTTVLLVLVITNLARKRIPPDVPILLNILHHLIPPALNPIVYGVRTKEIKQGIQNLLRRL

SEQ ID NO: 1999 - protein, 314 aa, Homo sapiens
MTTHRNDTLSTEASDFLLNCFVRSPSWQHWLSLPLSLLFLLAVGANTTLLMTIWLEASLHQPLYYLLSLLSLLDIVLCLTVIPKVLTIFWFDLRPISFPACFLQMYIMNCFLAMESCTFMVMAYDRYVAICHPLRYPSIITDHFVVKAAMFILTRNVLMTLPIPILSAQLRYCGRNVIENCICANMSVSRLSCDDVTINHLYQFAGGWTLLGSDLILIFLSYTFILRAVLRLKAEGAVAKALSTCGSHFMLILFFSTILLVFVLTHVAKKKVSPDVPVLLNVLHHVIPAALNPIIYGVRTQEIKQGMQRLLKKG

SEQ ID NO: 2000 - protein, 263 aa, Homo sapiens
LGLGGLLGNGAVLWLLSSNVYRNPFAIYLLDVACADLIFLGCHMVAIVPDLLQGRLDFPGFVQTSLATLRFFCYIVGLSLLAAVSVEQCLAALFPAWYSCRRPRHLTTCVCALTWALCLLLHLLLSSACTQFFGEPSRHLCRTLWLVAAVLLALLCCTMCGASLMLLLRVERGPQRPPPRGFPGLILLTVLLFLFCGLPFGIYWLSRNLLWYIPHYFYHFSFLMAAVHCAAKPVVYFCLGSAQGRRLPLRLVLQRALGDEAEL

SEQ ID NO: 2001 - protein, 286 aa, Homo sapiens
MFGLFGLWRTFDSVVFYLTLIVGLGGPVGNGLVLWNLGFRIKKGPFSIYLLHLAAADFLFLSCRVGFSVAQAALGAQDTLYFVLTFLWFAVGLWLLAAFSVERCLSDLFPACYQGCRPRHASAVLCALVWTPTLPAVPLPANACGLLRNSACPLVCPRYHVASVTWFLVLARVAWTAGVVLFVWVTCCSTRPRPRLYGIVLGALLLLFFCGLPSVFYWSLQPLLNFLLPVFSPLATLLACVNSSSKPLIYSGLGRQPGKREPLRSVLRRALGEGAELGARGQSLPM

SEQ ID NO: 2002 - protein, 299 aa, Homo sapiens
FLLLGIPGLEDVHIWIGVPFFFVYLVALLGNTALLFVIQTEQSLHEPMYYFLAMLDSIDLGLSTATIPKMLGIFWFNTKEISFGGCLSHMFFIHFFTAMESIVLVAMAFDRYIAICKPLRYTMILTSKIISLIAGIAVLRSLYMVVPLVFLLLRLPFCGHRIIPHTYCEHMGIARLACASIKVNIRFGLGNISLLLLDVILIILSYVRILYAVFCLPSWEARLKALNTCGSHIGVILAFFTPAFFSFLTHRFGHNIPQYIHIILANLYVVVPPALNPVIYGVRTKQIRERVLRIFLKTN

SEQ ID NO: 2003 - protein, 305 aa, Homo sapiens
SNSSKFQVSEFILMGFPGIHSWQHWLSLPLALLYLLALSANILILIIINKEAALHQPMYYFLGILAMADIGLATTIMPKILAILWFNAKTISLLECFAQMYAIHCFVAMESSTFVCMAIDRYVAICRPLRYPSIITESFVFKANGFMALRNSLCLISVPLLAAQRHYCSQNQIEHCLCSNLGVTSLSCDDRRINSINQVLLAWTLMGSDLGLIILSYALILYSVLKLNSPEAASKALSTCTSHLILILFFYTVIIVISITHSTGMRVPLIPVLLNVLHNVIPPALNPMVYALKNKELRQGLYKVL

SEQ ID NO: 2004 - protein, 517 aa, Homo sapiens
MDTRSLWTLAQARKPWAGSTLLLAVETLACSLCPQDHPFAFSLPNVLLQSQLFGPTFPADYSISFPTRPPLQAQIPRHSLAPLVRNGTEISITSLVLRKLDHLLPSNYGQGLGDSLYATPGLVLVISIMAGDRAFSQGEVIMDFGNTDGSPHCVFWDHSLFQGRGGWSKEGCQAQVASASPTAQCLCQHLTAFSVLMSPHTVPEEPALALLTQVGLGASILALLVCLGVYWLVWRVVVRNKISYFRHAALLNMVFCLLAADTCFLGAPFLSPGPRSPLCLAAAFLCHFLYLATFFWMLAQALVLAHQLLFVFHQLAKHRVLPLMVLLGYLCPLGLAGVTLGLYLPQGQYLREGECWLDGKGGALYTFVGPVLAIIGVNGLVLAMAMLKLLRPSLSEGPPAEKRQALLGVIKALLILTPIFGLTWGLGLATLLEEVSTVPHYIFTILNTLQGVFILLFGCLMDRKIQEALRKRFCRAQAPSSTISLVSCCLQILSCASKSMSEGIPWPSSEDMGTARS

SEQ ID NO: 2005 - protein, 290 aa, Homo sapiens
TTGDWSSEGCSTEVRPEGTVCCCDHLTFFALLLRPTLDQSTVHILTRISQAGCGVSMIFLAFTIILYAFLRLSRERFKSEDAPKIHVALGGSLFLLNLAFLVNVGSGSKGSDAACWARGAVFHYFLLCAFTWMGLEAFHLYLLAVRVFNTYFGHYFLKLSLVGWGLPALMVIGTGSANSYGLYTIRDRENRTSLELCWFREGTTMYALYITVHGYFLITFLFGMVVLALVVWKIFTLSRATAVKERGKNRKKVLTLLGLSSLVGVTWGLAIFTPLGLSTVYIFALFNSLQ

SEQ ID NO: 2006 - protein, 263 aa, Homo sapiens
MAPTGLLVAGASFLAFRGLHWGLRRLPTPESAARDRWQWWNLCVSLAHSLLSGTGALLGLSLYPQMAADPIHGHPRWALVLVAVSVGYFLADGADLLWNQTLGKTWDLLCHHLVVVSCLSTAVLSGHYVGFSMVSLLLELNSACLHLRKLLLLSRQAPSLAFSVTSWASLATLALFRLVPLGWMSLWLFRQHHQVPLALVTLGGIGLVTVGIMSIILGIRILVNDVLQSRPHPPSPGHEKTRGTRTRRDNGPVTSNSSTLSLK

SEQ ID NO: 2007 - protein, 106 aa, Homo sapiens
MATLGFVTPEAPFESSKPPIFEGLSPTVYSNPEGFKEKFLRKTRENPVVPIGFLCTAAVLTNGLYCFHQGNSQCSRLMMHTQIAAQGFTIAAILLGLAATAMKSPP

SEQ ID NO: 2008 - protein, 152 aa, Homo sapiens
GEALGSALHPGTILLALLIIPSSILPPLSFCERFFLRLNRNGLPKAPDKPERHCSLFVDLGSSELRKDIYITVHIIRIGRMGAGEKKNACSVQYRRPFGCAVLSIADLLTGETKDDLILKVYMCNTESEWYQIHENIIKKLNARYNLTGSNA

SEQ ID NO: 2009 - protein, 62 aa, Homo sapiens
ILQIVLYSQGFHSLFLGLCLMLLLAASCLPFPGIMGLSHRSNREDSQESTADAPPQRSLYLP

SEQ ID NO: 2010 - protein, 292 aa, Homo sapiens
GNWTAAVTEFVLLGFSLSREVELLLLVLLLPTFLLTLLGNLLIISTVLSCSRLHTPMYFFLCNLSILDILFTSVISPKVLANLGSRDKTISFAGCITQCYFYFFLGTVEFLLLTVMSYDRYATICCPLRYTTIMRPSVCIGTVVFSWVGGFLSVLFPTILISQLPFCGSNIINHFFCDSGPLLALACADTTAIELMDFMLSSMVILCCIVLVAYSYTYIILTIVRIPSASGRKKAFNTCASHLTIVIIPSGITVFIYVTPSQKEYLEINKIPLVLSSVVTPFLNPFIYTLRN

SEQ ID NO: 2011 - protein, 285 aa, Homo sapiens
ITVLLKYLCAEYGWRNAMLIQGAVSLNLFVFGTLMRPLPPGKNPNDPEEKDLRVLPAHSTESVMSNGQQGRIEEKDGGSGNEETLCDLQAQECPDQARSCALVLKTVSWLIMRVKKGFEDWYSGYFGTLFTNRMFVAFVFWASFAYSSFVISFIHLPEIVNLYNLLEQTKVFPLTSIIAIVHIVGKVILGVIADLPCISVWNVFLLASFVLVLIFLILPLMHMYAGLVVICTLTGFSSGYFSLMPIVTEDLVGIEHLANAYGIIICANGISALLGPPFAGKLSEV

SEQ ID NO: 2012 - protein, 186 aa, Homo sapiens
NGGWSSWAEWSPCSNRCGRGWQKRTRTCTNPAPLNGGAFCEGQAFQKTACTTICPVDGAWTEWSKWSACSTECAHWRSRECMAPPPQNGGRDCSGTLLDSKNCTDGLCMQNKKTLSDPNSHLLEASGDAALYAGLVVAIFVVVAILMAVGVVVYRRNCRDFDTDITDSSAALTGGFHPVNFKTARP

SEQ ID NO: 2013 - protein, 264 aa, Homo sapiens
AGTSCPVLCTCRNQVVDCSSQRLFSVPPDLPMDTRNLSLAHNRITAVPPGYLTCYMELQVLDLHNNSLMELPRGLFLHAKRLAHLDLSYNNFSHVPADMFQEAHGLVHIDLSHNPWLRRVHPQAFQGLMQLRDLDLSYGGLAFLSLEALEGLPGLVTLQIGGNPWVCGCTMEPLLKWLRNRIQRCTADSQLAECRGPPEVEGAPLFSLTEESFKACHLTLTLDDYLFIAFVGFVVSIASVATNFLLGITANCCHRWSKASEEEE

SEQ ID NO: 2014 - protein, 226 aa, Homo sapiens
SASRTMCTSLTTCEWKKVFYEKMEVAKPADSWELIIDPNLKPSELAPGWKQYLEQHASGRFHCSWCWHTWQSAHVVILFHMFLDRAQRAGSVRMRVFKQLCYECGTARLDESSMLEENIEGLVDNLITSLREQCYEEDGGQYRIHVASRPDSGPHRAEFCEACQEGIVHWKPSEKLLEEEVTTYTSEASKPRAQAGSGYNFLSLRWCLFWASLCLLVVYLQFSFLS

SEQ ID NO: 2015 - protein, 304 aa, Homo sapiens
MQRSNHTVTEFILLGFTTDPGMQLGLFVVFLGVYSLTVVGNSTLIVLICNDSCLHTPMYFFTGNLSFLDLWYSSVYTPKILVTCISEDKSISFAGCLCQFFFSAGLAYSECYLLAAVAYDRYVAISKPLLYAQAMSIKLCALLVAVSYCGGFINSSIITKKTFSFNFCRENIIDDFFCDLLPLVELACGEKGGYKIMMYFLLASNVICPAVLILASYLFIITSVLRISSSKGYLKAFSTCSSHLTSVTLYYGSILYIYALPRSSYSFDMDKIVSTFYTVVFPMLNLMIYSLRNKDVKEALKKLL

SEQ ID NO: 2016 - protein, 307 aa, Homo sapiens
NSTLVTEFILLGLKDLPELQPILFVLFLLIYLITVGGNLGMLVLIRIDSHLHTPMYFFLASLSCLDLYYSTNVTPKMLVNFFSDKKAISYAACLVQCYFFIAVVITEYYMLAVMAYDRYVAICNPLLYSSKIMSKSVCSFLITVLYVYGALTGLMETMWTYNLAFCGPSEINHFYCVDPPLIKLACSDTYNKEVSMFVVAGFNFTYPLLIILISYLYIFPATLRICSTEGRHKAFSTCGSHLTAVTIFYSALFFMYLRRPSEESMEQGKMVAVFYTTVIPMLNPMIYSLRNKDVKEALCKELFKRKL

SEQ ID NO: 2017 - protein, 306 aa, Homo sapiens
MAEVNIIYVTVFILKGITNRPELQAPCFGVFLVIYLVTVLGNLGLITLIKIDTRLHTPMYYFLSHLAFVDLCYSSAITPKMMVNFVVERNTIPFHACATQLGCFLTFMITECFLLASMAYDCYVAICSPLHYSTLMSRRVCIQLVAVPYIYSFLVALFHTVITFRLTYCGPNLINHFYCDDLPFLALSCSDTHMKEILIFAFAGFDMISSSSIVLTSYIFIIAAILRIRSTQGQHKAISTCGSHMVTVTIFYGTLIFMYLQPKSNHSLDTDKMASVFYTVVIPMLNPLIYSLRNKEVKDASKKALD

SEQ ID NO: 2018 - protein, 263 aa, Homo sapiens
MRIFRPWRLRCPALHLPSLSVFSLRWKLPSLTTDETMCKSVTTDEWKKVFYEKMEEAKPADSWDLIIDPNLKHNVLSPGWKQYLELHASGRFHCSWCWHTWQSPYVVILFHMFLDRAQRAGSVRMRVFKQLCYECGTARLDESSMLEENIEGLVDNLITSLREQCYGERGGQYRIHVASRQDNRRHRGEFCEACQEGIVHWKPSEKLLEEEATTYTFSRAPSPTKSQDQTGSGWNFCSIPWCLFWATVLLLIIYLQFSFRSSV

SEQ ID NO: 2019 - protein, 302 aa, Homo sapiens
DNFTVVTEFILLGLTDHAELKAVLFVVFLVIYAITLLRNLGMILLIQITSKLHTPMYFLLSCLSFVDACYSSAIAPKMLVNLLVVKATISFSACMVQHLCFGVFITTEGFLLSVMAYDRYVAIVSPLLYTVAMSDRKCVELVTGSWIGGIVNTLIHTISLRRLSFCRLNAVSHFFCDIPSLLKLSCSDTSMNELLLLTFSGVIAMATFLTVIISYIFIAFASLRIHSASGRQQAFSTCASHLTAVTIFYGTLIFSYIQPSSQYFVEQEKVVSMFYTLGIPMLNLLIHSLRNKDVKEAVKRAI

SEQ ID NO: 2020 - protein, 301 aa, Homo sapiens
NHTGAKEFLLVGLTENPNLQIPLFLLVTLIYFITLLDNLGIIILIWLNAQLHTPMYFFLGNLSFCDICYSTVFAPKMLVNFLSKHKSSTFSGCVLQSFPFAVYVTTKDILLSMMAYDHYVAIANPLLYTVIMAQKVCIQMVLASYLGGLINSLTHTIGLLKLDFCGPNIVNHYFCDVPPLLRLSCSDAHINEMLPLVFSGLIAMFTFIVIMVSYICIIIAIQRIHAAEGRYKAFSTCVSHLTTVTLFYGSVSFSYIQPSSQYSLEQEKVLAVFYTLVIPMLNPLIYSLRNKDVKDAAKRLI

SEQ ID NO: 2021 - protein, 305 aa, Homo sapiens
NVTTIMEFVLLGFSDIPNLHWMLFSIFLLMYLMILMCNGIIILLIKIHPALQTPMYFFLSNFSLLEICYVTIIIPRMLMDIWTQKGNISLFACATQMCFFLMLGGTECLLLTVMAYDRYVAICKPLQYPLVMNHKVCIQLIIASWTITIPVVIGETCQIFLLPFCGTNTINHFFCDIPPILKLACGNIFVNEITVHVVAVVFITVPFLLIVVSYGKIISNILKLSSARGKAKAFSTCSSHLIVVILFFGAGTITYLQPKPHQFQRMGKLISLFYTILIPTLNPIIYTLRNKDIMVALRKLLAKLL

SEQ ID NO: 2022 - protein, 224 aa, Homo sapiens
MNIEVGNISYTGAIISWSSSEPCLEDYYHIMYRPNWNSIFSGYLRYSFHHEEKVPRTISSVVLEHLAPSTLYFLCISCKKAAFPYRHYCTMFHTLDKSPLAPGSSLVDPQISLWVLMAILLACFTAVLAFICLQFWCVRCHEPRWSYRAGHMEEANGLVRWPEEAPDLGQREEDLQGLPLVEMPRKNSRDGAELDPEANQDAPDAGALQRGGGDPPAILPHCGE

SEQ ID NO: 2023 - protein, 332 aa, Homo sapiens
FSRVGSSSFWGGLGGGYGGASGIGGITAVMVNQSKFVSFIDKVPFLEQQNKMLETKWSLLQQQEMAQSNMDNMFESYINNLRRQLETLGQEKLKLETELGNIQGLVEDFKDENEDEINMRKEMANEFVLLKKDVDEADMNKVELESRLDGLTDEINFLRQLYEEEIRELHSQISDTSVVLSVDNSPPWTWKASSLRSRYEVIANRSLAEAESMDQVKYEELQVLAGKQGDDLGIQTEISEMNRNISWLQAETEGLKGRMASEAAIADAEQRGELAVKDANVKLSELEATLQRAKQDMARRLREYQELMNVKLALDIEIATYGKLLEGEESQL

SEQ ID NO: 2024 - protein, 212 aa, Homo sapiens
VDICYSSVTAPKMIVDLLAKDKTISYVGCMLQLLGVHFFGCTEIFILTVMAYDRYVAICKPLHYMTIMNRETCNKMLLGTWVGGFLHSIIQVALVVQLPFCGPNEIDHYFCDVHPVLKLACTETYIVGVVVTANSGTIALGSFVILLISYSIILVSLRKQSAEGRRKALSTCGSHIAMVVIFFGPCTFMYMRPDTTFSEDKMVAVFYTIITP

SEQ ID NO: 2025 - protein, 270 aa, Homo sapiens
MQVWARRRKLPAGILKVCKEVSLCDDKSASKEKSKKPVRFLPQLSMVIYQYTIILHSFMIMFVYYFSSLKVSTKPHWQQAAPSFHLSVKQDDESPEPFSVKNEQSHAEYMERFGKKGKLPHQVDDSYVGPSTSKSKGKSPHKERENFRSTLVNVIMQQDADLDSAVPDGSTIPKPTASAIEKDILRYYYYIHHGIDTDHVAPMEDSWLEHVLDLVPQHLKVFTDSIVTLSDEMREDYLLSVRKSIVDFVLKDPREKGDDKKTDELPAHRA

SEQ ID NO: 2026 - protein, 213 aa, Homo sapiens
LIDAVLSTTISPILIVDLLCDKKTISFPACMGQLFTDHLFGGTEIFLLVVMAYDRYVAICKPLHYLTIMNRQVSILLLVVAMTGGFLHSVFQIAVLYSLPFCGPNVIDHFFCDMYPLLELACTDTYSIGLTVVFSGGAMCMVIFALLLISYGVSLNSLKTYSQEGRRKALSTCSSHITVVVLFFVPCIFMYVRPVSNFPIDKFVTVFYTVITP

SEQ ID NO: 2027 - protein, 470 aa, Homo sapiens
MDTTMEADLGATGHRPRTELDDEDSYPQGGWDTVFLVALLLLGLPANGLMAWLAGSQARHGAGTRLALLLLSLALSDFLFLAAAAFQILEIRHGGHWPLGTAACRFYYFLWGVSYSSGLFLLAALSLDRCLLALCPHWYPGHRPVRLPLWVCAGVWVLATLFSVPWLVFPEAAVWWYDLVICLDFWDSEELSLRMLEVLGGFLPFLLLLVCHVLTQATACRTCHRQQQPAACRGFARVARTILSAYVVLRLPYQLAQLLYLAFLWDVYSGYLLWEALVYSDYLILLNSCLSPFLCLMASADLRTLLRSVLSSFAAALCEERPGSFTPTEPQTQLDSEGPTLPEPMAEAQSQMDPVAQPQVNPTLQPRSDPTAQPQLNPTAQPQSDPTAQPQLNLMAQPQSDSVAQPQADTNVQTPAPAASSVPSPCDEASPTPSSHPTPGALEDPATPPASEGESPSSTPPEAAPGAGPT

SEQ ID NO: 2028 - protein, 252 aa, Homo sapiens
MKVLATSFVLGSLGLAFYLPLVVTTPKTLAIPEKLQEAVGKVIINATTCTVTCGLGYKEETVCEVGPDGVRRKCQTRRLECLTNWICGMLHFTILIGKEFELSCLSSDILEFGQEAFRFTWRLARGVISTDDEVFKPFQANSHFVKFKYAQEYDSGTYRCDVQLVKNLRLVKRLYFGLRVLPPNLVNLNFHQSLTEDQKLIDEGLEVNLDSYSKPHHPKWKKKVASALGIGIAIGVVGGVLVRIVLCALRGG

SEQ ID NO: 2029 - protein, 204 aa, Homo sapiens
KCSGCTWRMTEKTNGVKSSPANNHNHHAPPAIKANGKDDHRTSSRPHSAADDDTSSELQRLADVDAPQQGRSGFRRIVRLVGIIREWANKNFREEEPRPDSFLERFRGPELQTVTTQEGDGKGDKDGEDKGTKKKFELFVLDPAGDWYYCWLFVIAMPVLYNWCLLVARACFSDLQKGYYLVWLVLDYVSDVVYIADLFIRLRT

SEQ ID NO: 2030 - protein, 324 aa, Homo sapiens
MLGPAYNHTMETPASFLLVGIPGLQSSHLWLAISLSAMYIIALLGNTIIVTAIWMDSTRHEPMYCFLCVLAAVDIVMASSVVPKMVSIFCSGDSSISFSACFTQMFFVHLATAVETGLLLTMAFDRYVAICKPLHYKRILTPQVMLGMSMAITIRAIIAITPLSWMVSHLPFCGSNVVVHSYCEHIALARLACADPVPSSLYSLIGSSLMVGSDVAFIAASYILILKAVFGLSSKTAQLKALSTCGSHVGVMALYYLPGMASIYAAWLGQDVVPLHTQVLLADLYVIIPATLNPIIYGMRTKQLRERIWSYLMHVLFDHSNLGS

SEQ ID NO: 2031 - protein, 297 aa, Homo sapiens
LGLSGDPELQPVLALLSLSLSMYLVTVLRNLLIILAVNPDSHLHTPMYFFLSNLCWANLSFTSATVPKMTVDMQLHSRVISHAGCLTQMSFLVLFACIEDMLLTMMAYDCFVAICRPLHYPVIVNPHPLCLLHLVSFFLSLLDSQLHSWIVLQFTIFKNVEISTFVCEPSQLLNLACSDSVINRIFMYFDSTMFGFLPISGFLLSFYKIVPSILRMSSSDGKYKALATCGSHLAVVCLFYGTGIGVHLTSAVAPPPRNGVVASVMYAVVTPMLNPFIYSLRNRDIQSALQRLRSTTV

SEQ ID NO: 2032 - protein, 220 aa, Homo sapiens
MGEWAFLGSLLDAVQLQSPLVGRLWLVVMLIFRILVLATVGGAVFEDEQEEFVCNTLQPGCRQTCYDRAFPVSHYRFWLFHILLLSAPPVLFVVYSMHRAGKEAGGAEAAAQCAPGLPEAHVALRLLAELTFLGGQALLYGFRVAPHFACAGPPCPHTVDCFVSRPTEKTVFVLFYFAVGLLSALLSVAELGHLLWKGRPRAGERDNRCNRAHEEAQKLL

SEQ ID NO: 2033 - protein, 118 aa, Homo sapiens
ILSIEQLISRVGVIGVTLMALLSGFGAVNCPYTYMSYFLRNVTDTDILALERRLLQTMDMIISKKKRLRGPGVVGFLLTYSPVGQITEDLTLIQQEVDALEELSRQLFLETADLYATK

SEQ ID NO: 2034 - protein, 401 aa, Homo sapiens [sequence omitted]

SEQ ID NO: 2035 - protein, 365 aa, Homo sapiens
MRALGYSQWKGTIGFLYSQFSVLRSIGERECEQCGEDYWSNAQKSECVLKEVEYLAYDEALGFTLVILSVFGAFVVLAVTAVYVIHRHTPLVNASDWQLGFLIQVSLIIMLLSSMLFIDKPHNWSCMAGQVTLALGFSLCLSCLLGKTSSLFLAYRISKSKTQLTSMHPLYRKIIVLISVLAEIGICTAYLILEPPMVYKNMESQNTKIILGCNEISIEFLYSMFGIDAFLALLCFLTTFVARQLPDNYYEGKCITFGMLVFFIIWMSFVPVYLSTKGKFKMAVEIFAILASSHGLLGCIFAPKCLIILLRPERNTSEIVCGRVSTTDNCIQLTSAFVSSELNNTTVSTVLDDRVLIYMCPLKLQ

SEQ ID NO: 2036 - protein, 314 aa, Homo sapiens
EFREFENGSICVECDPQCEKMEDGLLTCHGPGPDNCTKCSHFKDGPNCVEKCPDGLQGANSFIFKYADPDRECHPCHPNCTQGTPLIAAGVIGGLFILVIVGLTFAVYVRRKSIKKKRALRRFLETELVEPLTPSGTAPNQAQLRILKETELKRVKVLGSGAFGTVYKGIWVPEGETVKIPVAIKILNETTGPKANVEFMDEALIMASMDHPHLVRLLGVCLSPTIQLVTQLMPHGCLLEYVHEHKDNIGSQLLLNWCVQIAKLKATLDSVTKWKTAQILGPRFHHKQAYELCDNRQTVPVVSTGKWGEHHPSF

SEQ ID NO: 2037 - protein, 436 aa, Homo sapiens
MSWSFLTRLLEEIHNHSTFVGKVWLTVLVVFRIVLTAVGGEAIYSDEQAKFTCNTRQPGCDNVCYDAFAPLSHVRFWVFQIVVISTPSVMYLGYAVHRLARASEQERRRALRRRPGPRRAPRAHLPPPHAGWPEPADLGEEEPMLGLGEEEEEEETGAAEGAGEEAEEAGAEEACTKAVGADGKAAGTPGPTGQHDGRRRIQREGLMRVYVAQLVARAAFEVAFLVGQYLLYGFEVRPFFPCSRQPCPHVVDCFVSRPTEKTVFLLVMYVVSCLCLLLNLCEMAHLGLGSAQDAVRGRRGPPASAPAPAPRPPPCAFPAAAAGLACPPDYSLVVRAAERARAHDQNLANLALQALRDGAAAGDRDRDSSPCVGLPAASRGPPRAGAPASRTGSATSAGTVGEQGRPGTHERPGAKPRAGSEKGSASSRDGKTTVWI

SEQ ID NO: 2038 - protein, 255 aa, Homo sapiens
MKVKEEKAGVGKLDHTNHRRRFPDQKECPPIHIGLPVPTYPQRKTDQKGHLSGLQKVHWGLRPDQPQQELTGPGSGASSQDSSMDLISRTRSPAAEQLQDILGEEDEAPNPTLFTEMDTLQHDGDQMEWKESARWIKFEEKVEEGGERWSKPHVSTLSLHSLFELRTCLQTGTVLLDLDSGSLPQIIDDVIEKQIEDGLLRPELRERVSYVLLRRHRHQTKKPIHRSLADIGKSVSTTNRSPARSPGAGPSLHHS

SEQ ID NO: 2039 - protein, 488 aa, Homo sapiens
MSTPGVNSSASLSPDRLNSPVTIPAVMFIFGVVGNLVAIVVLCKSRKEQKETTFYTLVCGLAVTDLLGTLLVSPVTIATYMKGQWPGGQPLCEYSTFILLFFSLSGLSIICAMSVERYLAINHAYFYSHYVDKRLAGLTLFAVYASNVLFCALPNMGLGSSRLQYPDTWCFIDWTTNVTAHAAYSYMYAGFSSFLILATVLCNVLVCGALLRMHRQFMRRTSLGTEQHHAAAAASVASRGHPAASPALPRLSDFRRRRSFRRIAGAEIQMVILLIATSLVVLICSIPLVVRVFVNQLYQPSLEREVSKNPDLQAIRIASVNPILDPWIYILLRKTVLSKAIEKIKCLFCRIGGSRRERSGQHCSDSQRTSSAMSGHSRSFISRELKEISSTSQTLLPDLSLPDLSENGLGGRNLLPGVPGMGLAQEDTTSLRTLRISETSDSSQGQDSESVLLVDEAGGSGRAGPAPKGSSLQVTFPSETLNLSEKCI

SEQ ID NO: 2040 - protein, 879 aa, Homo sapiens
MDVGEEPLEKAARARTAKDPNTYKVLSLVLSVCVLTTILGCIFGLKPSCAKEVKSCKGRCFERTFGNCRCDAACVELGNCCLDYQETCIEPEHIWTCNKFRCGEKRLTRSLCACSDDCKDKGDCCINYSSVCQGEKSWVEEPCESINEPQCPAGFETPPTLLFSLDGFRAEYLHTWGGLLPVISKLKKCGTYTKNMRPVYPTKTFPNHYSIVTGLYPESHGIIDNKMYDPKMNASFSLKSKEKFNPEWYKGEPIWVTAKYQGLKSGTFFWPGSDVEINGIFPDIYKMYNGSVPFEERILAVLQWLQLPKDERPHFYTLYLEEPDSSGHSYGPVSSEVIKALQRVDGMVGMLMDGLKELNLHRCLNLILISDHGMEQGSCKKYIYLNKYLGDVKNIKVIYGPAARLRPSDVPDKYYSFNYEGIARNLSCREPNQHFKPYLKHFLPKRLHFAKSDRIEPLTFYLDPQWQLALNPSERKYCGSGFHGSDNVFSNMQALFVGYGPGFKHGIEADTFENIEVYNLMCDLLNLTPAPNNGTHGSLNHLLKNPVYTPKHPKEVHPLVQCPFTRNPRDNLGCSCNPSILPIEDFQTQFNLTVAEEKIIKHETLPYGRPRVLQKENTICLLSQHQFMSGYSQDILMPLWTSYTVDRNASICHLFIFSTEDFSNCLYQDFRIPLSPVHKCSFYKNNTKVSYGFLSPPQLNKNSSGIYSEALLTTNIVPMYQSFQVIWRYFHDTLLRKYAEERNGVNVVSGPVFDFDYDGRCDSLENLRQKRRVIRNQEILIPTHFFIVLTSCKDTSQTPLHCENLDTLAFILPHRTDNSESCVHGKHDSSWVEELLMLHRARITDVEHITGLSFYQQRKEPVSDILKLKTHLPTFSQED

SEQ ID NO: 2041 - protein, 505 aa, Homo sapiens
MPQALERADGSWAWVVLLATMVTQGLTLGFPTCIGIFFTELQWEFQASNSETSWFPSILTAVLHMAGPLCSILVGRFGCRVTVMLGGVLASLGMVASSFSHNLSQLYFTAGFITGLGMCFSFQSSITVLGFYFVRRRVLANALASMGVSLGITLWPLLSRYLLENLGWRGTFLVFGGIFLHCCICGAIIRPVATSVAPETKECPPPPPETPALGCLAACGRTIQRHLAFDILRHNTGYCVYILGVMWSVLGFPLPQVFLVPYAMWHSVDEQQAALLISIIGFSNIFLRPLAGLMAGRPAFASHRKYLFSLALLLNGLTNLVCAASGDFWVLVGYCLAYSVSMSGIGALIFQVLMDIVPMDQFPRALGLFTVLDGLAFLISPPLAGLLLDATNNFSYVFYMSSFFLISAALFMGGSFYALQKKEQGKQAVAADALERDLFLEAKDGPGKQRSPEIMCQSSRQPRPAGVNKHLWGCPASSRTSHEWLLWPKAVLQAKQTALGWNSPT

SEQ ID NO: 2042 - protein, 349 aa, Homo sapiens
  VARIANT 296, 320, 321: Xaa = Any Amino Acid
SRLRGSRRFLSGFVAGAVVGAAGALAALQFFRSQGAEGALTGKQPDGSAEKAVLEQFGFPLTGTEARCYTNHALSYDQAKRVPRWVLEHISKSKIMGDADRKHCKFKPDPNIPPTFSAFNEDYVGSGWSRGHMAPAGNNKFSSKAMAETFYLSNIVPQDFDNNSGYWNRIEMYCRELTERFEDVWVVSGPLTLPQTRGDGKKIVSYQVIGEDNVAVPSHLYKVILARRSSVSTEPLALGAFVVPNEAIGFQPQLTEFQVSLQDLEKLSGLVFFPHLDRTSDIRNICSVDTCKLLDXQEFTLYLSTRKIEGARSVLRLEKXXENLKNAEIEPDDYFMSRYEKKLENSKLR

SEQ ID NO: 2043 - protein, 255 aa, Homo sapiens
MENSLRCVWVPKLAFVLFGASLFSAHLQVTGFQIKAFTALRFLSEPSDAVTMRGGNVLLDCSAESDRGVPVIKWKKDGIHLALGMDERKQQLSNGSLLIQNILHSRHHKPDEGLYQCEASLGDSGSIISRTAKVAVAGPLRFLSQTESVTAFMGDTVLLKCEVIGEPMPTIHWQKNQQDLTPIPGDSRVVVLPSGALQISRLQPGDIGIYRCSARNPASSRTGNEAEVRILSDPGLHRQLYFLQRPSNVVAIEGK

SEQ ID NO: 2044 - protein, 385 aa, Homo sapiens
MWGRLLLWPLVLGFSLSGGTQTPSVYDESGSTGGGDDSTPSILPAPRGYPGQVCANDSDTLELPDSSRALLLGWVPTRLVPALYGLVLVVGLPANGLALWVLATQAPRLPSTMLLMNLAAADLLLALALPPRIAYHLRGQRWPFGEAACRLATAALYGHMYGSVLLLAAVSLDRYLALVHPLRARALRGRRLALGLCMAAWLMAAALALPLTLQRQTFRLARSDRVLCHDALPLDAQASHWQPAFTCLALLGCFLPLLAMLLCYGATLHTLAASGRRYGHALRLTAVVLASAVAFFVPSNLLLLLHYSDPSPSAWGNLYGAYVPSLALSTLNSCVDPFIYYYVSAEFRDKVRAGLFQRSPGDTVASKASAEGGSRGMGTHSSLLQ

SEQ ID NO: 2045 - protein, 766 aa, Homo sapiens
MRLWKAVVVTLAFMSVDICVTTAIYVFSHLDRSLLEDIRHFNIFDSVLDLWAACLYRSCLLLGATIGVAKNSALGPRRLRASWLVITLVCLFVGIYAMVKLLLFSEVRRPIRDPWFWALFVWTYISLGASFLLWWLLSTVRPGTQALEPGAATEAEGFPGSGRPPPEQASGATLQKLLSYTKPDVAFLVAASFFLIVAALGETFLPYYTGRAIDGIVIQKSMDQFSTAVVIVCLLAIGSSFAAGIRGGIFTLIFARLNIRLRNCLFRSLVSQETSFFDENRTGDLISRLTSDTTMVSDLVSQNINVFLRNTVKVTGVVVFMFSLSWQLSLVTFMGFPIIMMVSNIYGKYYKRLSKEVQNALARASNTAEETISAMKTVRSFANEEEEAEVYLRKLQQVYKLNRKEAAAYMYYVWGSGLTLLVVQVSILYYGGHLVISGQMTSGNLIAFIIYEFVLGDCMESVGSVYSGLMQGVGAAEKVFEFIDRQPTMVHDGSLAPDHLEGRVDFENVTFTYRTRPHTQVLQNVSFSLSPGKVTALVGPSGSGKSSCVNILENFYPLEGGRVLLDGKPISAYDHKYLHRVISLVSQEPVLFARSITDNISYGLPTVPFEMVVEAAQKANAHGFIMELQDGYSTETGEKGAQLSGGQKQRVAMARALVRNPPVLILDEATSALDAESEYLIQQAIHGNLQKHTVLIIAHRLSTVEHAHLIVVLDKGRVVQQGTHQQLLAQGGLYAKLVQRQMLGLQPAADFTAGHNEPVANGSHKA

SEQ ID NO: 2046 - protein, 726 aa, Homo sapiens
MAVGEPLVHIRVTLLLLWFGMFLSISGHSQARPSQYFTSPEVVIPLKVISRGRGAKAPGWLSYSLRFGGQRYIVHMRVNKLLFAAHLPVFTYTEQHALLQDQPFIQDDCYYHGYVEGVPESLVALSTCSGGFLGMLQINDLVYEIKPISVSATFEHLVYKIDSDDTQFPPMRCGLTEEKIAHQMELQLSYNFTLKQSSFVGWWTHQRFVELVVVVDNIRYLFSQSNATTVQHEVFNVVNIVDSFYHPLEVDVILTGIDIWTASNPLPTSGDLDNVLEDFSIWKNYNLNNRLQHDVAHLFIKDTQGMKLGVAYVKGICQNPFNTGVDVFEDNRLVVFAITLGHELGHNLGMQHDTQWCVCELQWCIMHAYRKVTTKFSNCSYAQYWDSTISSGLCIQPPPYPGNIFRLKYCGNLVVEEGEECDCGTIRQCAKDPCCLLNCTLHPGAACAFGICCKDCKFLPSGTLCRQQVGECDLPEWCNGTSHQCPDDVYVQDGISCNVNAFCYEKTCNNHDIQCKEIFGQDARSASQSCYQEINTQGNRFGHCGIVGTTYVKCWTPDIMCGRVQCENVGVIPNLIEHSTVQQFHLNDTTCWGTDYHLGMAIPDIGEVKDGTVCGPEKICIRKKCASMVHLSQACQPKTCNMRGICNNKQHCHCNHEWAPPYCKDKGYGGSADSGPPPKNNMEGLNVMGKLRYLSLLCLLPLVAFLLFCLHVLFKKRTKSKEDEEG

SEQ ID NO: 2047 - protein, 97 aa, Homo sapiens
MKVSAALLWLLLIAAAFSPQGLAGPASVPTTCCFNLANRKIPLQRLESYRRITSGKCPQKAVIFKTKLAKDICADPKKKWVQDSMKYLDQKSPTPKP

SEQ ID NO: 2048 - protein, 846 aa, Homo sapiens
MRQVCCSALPPPPLEKGRCSSYSDSSSSSSERSSSSSSSSSESGSSSRSSSNNSSISRPAAPPEPRPQQQPQPRSPAARRAAARSRAAAAGGMRRDPAPGFSMLLFGVSLACYSPSLKSVQDQAYKAPVVVEGKVQGLVPAGGSSSNSTREPPASGRVALVKVLDKWPLRSGGLQREQVISVGSCVPLERNQRYIFFLEPTEQPLVFKTAFAPLDTNGKNLKKEVGKILCTDCATRPKLKKMKSQTGQVGEKQSLKCEAAAGNPQPSYRWFKDGKELNRSRDIRIKYGNGRKNSRLQFNKVKVEDAGEYVCEAENILGKDTVRGRLYVNSVSTTLSSWSGHARKCNETAKSYCVNGGVCYYIEGINQLSCKCPNGFFGQRCLEKLPLRLYMPDPKQKHLGFELKEAEELYQKRVLTITGICVALLVVGIVCVVAYCKTKKQRKQMHNHLRQNMCPAHQNRSLANGPSHPRLDPEEIQMADYISKNVPATDHVIRRETETTFSGSHSCSPSHHCSTATPTSSHRHESHTWSLERSESLTSDSQSGIMLSSVGTSKCNSPACVEARARRAAAYNLEERRRATAPPYHDSVDSLRDSPHSERSVPTPTYSPLSQRAGTTGPRLTLRAPQKHSKEPHLHFSYGKTSTPATLLSPEWPSASGVCRSRPAGPRNNSQYDTILPRAGPDRGRDLALGASLGSMPASPFRIPEDDEYETTQECAPPPPPRPRAHGASRRTSAGPRRWRRSRLNGLPAQRARAARDSLSLSSGSGGGSASASDDDADDADGALAAESTPFLGLRGAHDALRSDSPPLCPAADSRTYYSLDSHSTRASSRHSRGPPPRAKQDSAPL

SEQ ID NO: 2049 - protein, 192 aa, Homo sapiens
MAGLLALLGPAGRVGARVRPRATWLLGATAPCAPPPLALALLPPRLDARLLRTARGDCRGHQDPSQATGTTGSSVSCTEEKKQSKSQQLKKIFQEYGTVGVSLHIGISLISLGIFYMVVSSGVDMPAILLKLGFKESLVQSKMAAGTSTFVVAYAIHKLFAPVRISITLVSVPLIVRYFRKVGFFKPPAAKP

SEQ ID NO: 2050 - protein, 580 aa, Homo sapiens
KRGARRGGWKRKMPSTDLLMLKAFEPYLEILEVYSTKAKNYVNGHCTKYEPWQLIAWSVVWTLLIVWGYEFVFQPESLWSRFKKKCFKLTRKMPIIGRKIQDKLNKTKDDISKNMSFLKVDKEYVKALPSQGLSSSAVLEKLKEYSSMDAFWQEGRASGTVYSGEEKLTELLVKAYGDFAWSNPLHPDIFPGLRKIEAEIVRIACSLFNGGPDSCGCVTSGGTESILMACKAYRDLAFEKGIKTPEIVAPQSAHAAFNKAASYFGMKIVRVPLTKMMEVDVRAMRRAISRNTAMLVCSTPQFPHGVIDPVPEVAKLAVKYKIPLHVDACLGGFLIVFMEKAGYPLEHPFDFRVKGVTSISADTHKYGYAPKGSSLVLYSDKKYRNYQFFVDTDWQGGIYASPTIAGSRPGGISAACWAALMHFGENGYVEATKQIIKTARFLKSELENIKGIFVFGNPQLSVIALGSRDFDIYRLSNLMTAKGWNLNQLQFPPSIHFCITLLHARKRVAIQFLKDIRESVTQIMKNPKAKTTGMGAIYGMAQTTVDRNMVAELSSVFLDSLYSTDTVTQGSQMNGSPKPH

SEQ ID NO: 2051 - protein, 851 aa, Homo sapiens
FVLFCFVFSVSLQVDIVPSQGEISVGESKFFLCQGNSLKIISSSLVAGDAKDKDISWFSPNGEKLTPNQQRISVVWNDDSSSTLTIYNANIDDAGIYKCVVTGEDGSESEATVNVKIFQKLMFKNAPTPQEFREGEDAVIVCDVVSSLPPTIIWKHKGRDVILKKDVRFIVLSNNYLQIRGIKKTDEGTYRCEGRILARGEINFKDIQVIVNVPPTIQARQNIVNATANLGQSVTLVCDAEGFPEPTMSWTKDGEQIEQEEDDEKYIFSDDSSQLTIKKVDKNDEAEYICIAENKAGEQDATIHLKVFAKPKITYVENQTAMELEEQVTLTCEASGDPIPSITWRTSTRNISSEEKTLDGHMVVRSHARVSSLTLKSIQYTDAGEYICTASNTIGQDSQSMYLEVQYAPKLQGPVAVYTWEGNQVNITCEVFAYPSATISWFRDGQLLPSSNYSNIKIYNTPSASYLEVTPDSENDFGNYNCTAVNRIGQESLEFILVQADTPSSPSIDQVEPYSSTAQVQFDEPEATGGVPILKYKAEWRAVGEEVWHSKWYDAKEASMEGIVTIVGLKPETTYAVRLAALNGKGLGEISAASEFKTQPVREPSAPKLEGQMGEDGNSIKVNLIKQDDGGSPIRHYLVRYRAKLSSEWKPEIRLPSGSDHVMLKSLDWNAEYEVYVVAENQQGKSKAAHFVFRTSAQPTAIPANGSPTSGLSTGAIVGILIVIFVLLLVVVDITCYFLNKCGLFMCIAVNLCGKAGPGAKGKDMEEGKAAFSKDESKEPIVEVRTEEERTPNHDGGKHTEPNETTPLTEPEKGPVEAKPECQETETKPAPAEVKTVPNDATQTKENESKA

SEQ ID NO: 2052 - protein, 556 aa, Homo sapiens
MGFWILAILTILMYSTAAKFSKQSWGLENEALIVRCPRQGKPSYTVDWYYSQTNKSIPTQERNRVFASGQLLKFLPAAVADSGIYTCIVRSPTFNRTGYANVTIYKKQSDCNVPDYLMYSTVSGSEKNSKIYCPTIDLYNWTAPLEWFKNCQALQGSRYRAHKSFLVIDNVMTEDAGDYTCKFIHNENGANYSVTATRSFTVKDEQGFSLFPVIGAPAQNEIKEVEIGKNANLTCSACFGKGTQFLAAVLWQLNGTKITDFGEPRIQQEEGQNQSFSNGLACLDMVLRIADVKEEDLLLQYDCLALNLHGLRRHTVRLSRKNPIDHHSIYCIIAVCSVFLMLINVLVIILKMFWIEATLLWRDIAKPYKTRNDGKLYDAYVVYPRNYKSSTDGASRVEHFVHQILPDVLENKCGYTLCIYGRDMLPGEDVVTAVETNIRKSRRHIFILTPQITHNKEFAYEQEVALHCALIQNDAKVILIEMEALSELDMLQAEALQDSLQHLMKVQGTIKWREDHIANKRSLNSKFWKHVRYQMPVPSKIPRKASSLTPLAAQKQ

SEQ ID NO: 2053 - protein, 301 aa, Homo sapiens
GSHRSEYTGACNPCTEGVDYTIASNNLPSCLLCTVCKSGQTNKSSCTTTRDTVCQCEKGSFQDKNSPEMCRTCRTGCPRGMVKVSNCTPRSDIKCKNESAASSTGKTPAAEETVTTILGMLASPYHYLIIIVVLVIILAVVVVGFSCRKKFISYLKGICSGGGGGPERVHRVLFRRRSCPSRVPGAEDNARNETLSNRYLQPTQVSEQEIQGQELAELTGVTVELPEEPQRLLEQAEAEGCQRRRLLVPVNDADSADISTLLDASATLEEGHAKETIQDQLVGSEKLFYEEDEAGSATSCL

SEQ ID NO: 2054 - protein, 45 aa, Homo sapiens
MINITATQFKKRTYYLSFWFFLFRLTVLLVHYFFQLFLIPIIHSI

SEQ ID NO: 2055 - protein, 255 aa, Homo sapiens
MPVRRGHVAPQNTYLDTIIRKFEGQSRKFLIANAQMENCAIIYCNDGFCELFGYSRVEVMQQPCTCDFLTGPNTPSSAVSRLAQALLGAEECKVDILYYRKDASSFRCLVDVVPVKNEDGAVIMFILNFEDLAQLLAKCSSRSLSQRLLSQSFLGSEGSHGRPGGPGPGTGRGKYRTISQIPQFTLNFVEFNLEKHRSSSTTEIEIIAPHKVVERTQNVTEKVTQVLSLGADVLPEYKLQAPRIHRWTILHYSPF

SEQ ID NO: 2056 - protein, 433 aa, Homo sapiens
MGSPGATTGWGLLDYKTEKYVMTRNWRVGALQRLLQFGIVVYVVGWALLAKKGYQERDLEPQFSIITKLKGVSVTQIKELGNRLWDVADFVKPPQGENVFFLVTNFLVTPAQVQGRCPEHPSVPLANCWVDEDCPEGEGGTHSHGVKTGQCVVFNGTHRTCEIWSWCPVESGVVPSRPLLAQAQNFTLFIKNTVTFSKFNFSKSNALETWDPTYFKHCRYEPQFSPYCPVFRIGDLVAKAGGTFEDLALLGGSVGIRVHWDCDLDTGDSGCWPHYSFQLQEKSYNFRTATHWWEQPGVEARTLLKLYGIRFDILVTGQVGTGKFGLIPTAVTLGTGAAWLGVVTFFCDLLLLYVDREAHFYWRTKYEEAKAPKATANSVWRELALASQARLAECLRRSSAPAPTATAAGSQTQTPGWPCPSSDTHLPTHSGSL

SEQ ID NO: 2057 - protein, 129 aa, Homo sapiens
MTRNWWGGALQRLLQFGIVVYVVGWALLAKKGYQERDLEPQISITTKLKGVSVTQIKELGNRLWDVADFVKPPQGVCSPSEHLPRAQLSSSQCKPSQANFETCLLGRERVLLGDQLPCDASPRSGQMPR

SEQ ID NO: 2058 - protein, 592 aa, Homo sapiens
AAAAGAGNRAAVAVAVARADEAEAPFAGQNWLKSYGYLLPYDSRASALHSAKALQSAVSTMQQFYGIPVTGVLDQTTIEWMKKPRCGVPDHPHLSRRRRNKRYALTGQKWRQKHITYSIHNYTPKVGELDTRKAIRQAFDVWQKVTPLTFEEVPYHEIKSDRKEADIMIFFASGFHGDSSPFDGEGGFLAHAYFPGPGIGGDTHFDSDEPWTLGNANHDGNDLFLVAVHELGHALGLEHSSDPSAIMAPFYQYMETHNFKLPQDDLQGIQKIYGPPAEPLEPTRPLPTLPVRRIHSPSERKHERQPRPPRPPLGDRPSTPGTKPNICDGNFNTVALFRGEMFVFKDRWFWRLRNNRVQEGYPMQIEQFWKGLPARIDAAYERADGRFVFFKGDKYWVFKEVTVEPGYPHSLGELGSCLPREGIDTALRWEPVGKTYFFKGERYWRYSEERRATDPGYPKPITVWKGIPQAPQGAFISKEGYYTYFYKGRDYWKFDNQKLSVEPGYPRNILRDWMGCNQKEVERRKERRLPQDDVDIMVTINDVPGSVNAVAVVIPCILSLCILVLVYTIFQFKNKTGPQPVTYYKRPVQEWV

SEQ ID NO: 2059 - protein, 277 aa, Homo sapiens
MCVGARRLGRGPCAALLLLGLGLSTVTGLHCVGDTYPSNDRCCHECRPGNGMVSRCSRSQNTVCRPCGPGFYNDVVSSKPCKPCTWCNLRSGSERKQLCTATQDTVCRCRAGTQPLDSYKPGVDCAPCPPGHFSPGDNQACKPWTNCTLAGKHTLQPASNSSDAICEDRDPPATQPQETQGPPARPITVQPTEAWPRTSQGPSTRPVEVPGGRAVAAILGLGLVLGLLGPLAILLALYLLRRDQRLPPDAHKPPGGGSFRTPIQEEQADAHSTLAKI

SEQ ID NO: 2060 - protein, 441 aa, Homo sapiens
MAGPTEAETGLAEPRALCAQRGHRTYARRWVFLLAISLLNCSNATINWLSLVYLVVSTPFGVAAIWILDSVGLRAALGVYTIPAGVVCLLSTICLWESVPPTPPSAGAASSTSEKFLDGLKLQLMWNKAYVILAVCLGGMIGISASFSALLEQILCASGHSSGFSGLCGALFITFGILGALALGPYVDRTKHFTEATKIGLCLFSLACVPFALVSQLQGQTLALAATCSLLGLFGFSVGPVAMELAVECSFPVGEGAATGMIFVLGQAEGILIMLAMTALTVRRSEPSLSTCQQGEDPLDWTVSLLLMAGLCTFFSCILAVFFHTPYRRLQAESGEPPSTRNAVGGADSGPGVDRGGAGRAGVLGPSTATPECTARGASLEDPRGPGSPHPACHRATPRAQGPAATDAPSRPGRLAGRVQASRFIDPAGSHSSFSSPWVIT

SEQ ID NO: 2061 - protein, 554 aa, Homo sapiens
MKKHDFAENLPSSLLIIILVIFTLSGSKFGRGTGLTQPSQRTSARRSFGRSKRFSITRSLDDLAVCAGPAELTGADLKDCVSNNSLSSNASLPSVQSCRRLRERRVASWAVSFERLLQDPVGVRYFSDFLRKEFSEENILFWQACEYFNHVPAHDKKELSYRAREIFSKFLCSKATTPVNIDSQAQLADDVLRAPHPDMFKEQQLQIFNLMKFDSYTRFLKSPLYQECILAEVEGRALPDSQQVPSSPASKHSLGSDHSSVSTPKKLSGKSKSGRSLNEELGDEDSEKKRKGAFFSWSRTRSTGRSQKKREHGDHADDALHANGGLCRRESQGSVSSAGSLDLSEACRTLAPEKDKATKHCCIHLPDGTSCVVAVKAGFSIKDILSGLCERHGINGAAADLFLVGGDKPLVLHQDSSILESRDLRLEKRTLFRLDLVPINRSVGLKAKPTKPVTEVLRPVVARYGLDLSGLLVRLSGEKEPLDLGAPISSLDGQRVVLEEKDPSRGKASADKQKGVPVKQNTAVNSSSRNHSATSFLSLFPKLRATEQMTNVGC

SEQ ID NO: 2062 - protein, 255 aa, Homo sapiens
MVLLLCLSCLIFSCLTFSWLKIWGKMTDSKPITKSKSEANLIPSQEPFPASDNSGETPQRNGEGHTLPKTPSQAEPASHKGPKDAGRRRNSLPPSHQKPPRNPLSSSDAAPSPELQANGTGTQGLEATDTNGLSSSARPQGQQAGSPSKEDKKQANIKRQLMTNFILGSFDDYSSDEDSVAGSSRESTRKGSRASLGALSLEAYLTTGEAETRVPTMRPSMSGLHLVKRGREHKKLDLHRDFTVASPAEFVTRFG

SEQ ID NO: 2063 - protein, 884 aa, Homo sapiens
SLCARFDLSQLAKLRSVLFYTACLDPNFPATLFKDKMKCTVNNQQSKKIMVAADIVTIFNLIQMNGGAAKEKLPTGRQKVRKKEASFESCRSDTEICNAAECEPLNCELSERSFSRGYPIRQSSKCRKMDCKDCPQFVPASEPNFLLGVSKEVKNRAASLDRLQALAPYSVTSPQPCEMQRTYFPMNIENESISDQDSLPINQSIKETFISNEEPFVVQSCVQKRNIFKEDFHNLMAVSPSLVGPISKAENEHREPQSRKEPHKPPFFNHSFEMPYNSQYLNPVYSPVPDKRRAKHESLDDLQASTYFGPTPVMGTQEARRCLGKPNKQTPWPAKSWSLNTEEVPDFERSFFNRNPSEEKLHYPNASSQTPNFPAPERRPTYLVPKDQQPILPIAYAAKQNGLKSKEISSPVDLEKHEPVKKFKDKSINCTSGQLSSDTSSVGTQTEHVLEPKKCRDLCTSGQGKYSDRHTMKHSDDDSEIVSDDISDIFRFLDDMSISGSTGVIQSSCYNSTGSLSQLHKSDCDSSPEHNLTKIANGVPNSKGDKGNRPENTHHSEEELKTSVCKLVLRIGEIERKLESLSGVRDEISQVLGKLNKLDQKMQQPEKVSVQIDLNSLTSEGPSDDSASPRMFHAHSGSHGPKLENNPDWCCSDASGSNSESLRVKALKKSLFTRPSSRSLTEENSATESKIASISNSPRDWRTITYTNRVGLNEEEIKDTGPGDNKDWHRKSKEADRQYDIPPQHRLPKQPKDGFLVEQVFSPHPYPASLKAHMKSNPLYTDMRLTELAEVKRGQPSWTIEEYARNAGDKGKLTALDLQTQESLNPNNLEYWMEDIYTPGYDSLLKRKEAEFRRAKVCKIAALIAAAACTVILVIVVPICTMKS

SEQ ID NO: 2064 - protein, 763 aa, Homo sapiens
KLGTSAFSEVVTVNTLAFPITTPEPLVLVTPPRCLIANRTQQGVLLSWLPPANHSFPIDRYIMEFRVAERWELLDDGIPGTEGEFFAKDLSQDTWYEFRVLAVMQDLISEPSNIAGVSSTDIFPQPDLTEDGLARPVLAGIVATICFLAAAILFSTLAACFVNKQRKRKLKRKKDPPLSITHCRKSLESPLSSGKVSPESIRTLRAPSESSDDQGQPAAKRMLSPTREKELSLYKKTKRAISSKKYSVAKAEAEAEATTPIELISRGPDGRFVMDPAEMEPSLKSRRIEGFPFAEETDMYPEFRQSDEENEDPLVPTSVAALKSQLTPLSSSQESYLPPPAYSPRFQPRGLEGPGGLEGRLQATGQARPPAPRPFHHGQYYGYLSSSSPGEVEPPPFYVPEVGSPLSSVMSSPPLPTEGPFGHPTIPEENGENASNSTLPLTQTPTGGRSPEPWGRPEFPFGGLETPAMMFPHQLPPCDVPESLQPKAGLPRGLPPTSLQVPAAYPGILSLEAPKGWAGKSPGRGPVPAPPAAKWQDRPMQPLVSQGQLRHTSQGMGIPVLPYPEPAEPGAHGGPSTFGLDTRWYEPQPRPRPSPRQARRAEPSLHQVVLQPSRLSPLTQSPLSSRTGSPELAARARPRPGLLQQAEMSEITLQPPAAVSFSRKSTPSTGSPSQSSRSGSPSYRPAMGFTTLATGYPSPPPGPAPAGPGDSLDVFGQTPSPRRTGEELLRPETPPPTLPTSGKLQRDRPAPATSPPERALSKL

SEQ ID NO: 2065 - protein, 255 aa, Homo sapiens
MACWPQLRLLLWKNLTFRRRQTCQLLLEVAWPLFIFLILISVRLSYPPYEQHECHFPNKAMPSAGTLPWVQGIICNANNPCFRYPTPGEAPGVVGNFNKSIVARLFSDARRLLLYSQKDTSMKDMRKVLRTLQQIKKSSSNLKLQDFLVDNETFSGFLYHNLSLPKSTVDKMLRADVILHKVFLQGYQLHLTSLCNGSKSEEMIQLGDQEVSELCGLPREKLAAAERVLRSNMDILKPILRTLNSTSPFPSKELA

SEQ ID NO: 2066 - protein, 575 aa, Homo sapiens
MADRGGVGEAAAVGASPASVPGLNPTLGWRERLRAGLAGTGASLWFVAGLGLLYALRIPLRLCENLAAVTVFLNSLTPKFYVALTGTSSLISGLIFIFEWWYFHKHGTSFIEQVSVSHLQPLMGGTESSISEPGSPSRNRENETSRQNLSECKVWRNPLNLFRGAEYRRYTWVTGKEPLTYYDMNLSAQDHQTFFTCDTDFLRPSDTVMQKAWRERNPPARIKAAYQALELNNDCATAYVLLAEEEATTIVDAERLFKQALKAGETIYRQSQQCQHQSPQHEAQLRRDTNVLVYIKRRLAMCARKLGRIREAVKIMRDLMKEFPPLTMLNIHENLLESLLELQAYPDVQAVLAKYDDISLPKSAAICYTAALLKTRTVSEKFSPETASRRGLSTAEINAVEAIHRAVEFNPHVPKYLLEMKSLILPPEHILKRGDSEAIAYAFFHLQHWKRIEGALNLLQCTWEGTFRMIPYPLEKGHLFYPYPSCTETADRELLPTFHHVSVYPKKELPLFIHFTAGFCSSTAMIAILTHQFPEIMGIFAKAVLGLWCPQPWASSGFEENTQDLKSEDLGLSSG

SEQ ID NO: 2067 - protein, 255 aa, Homo sapiens
MSWFSGLLVPKVDERKTAWGERNGQKRSRRRGTRAGGFCTPRYMSCLRDAEPPSPTPAGPPRCPWQDDAFIRRGGPGKGKELGLRAVALGFEDTEVTTTAGGTAEVAPDAVPRSGRSCWRRLVQVFQSKQFRSAKLERLYQRYFFQMNQSSLTLLMAVLVLLTAVLLAFHAAPARPQPAYVALLACAAALFVGLMVVCNRHSFRQDSMWVVSYVVLGILAAVQVGGALAADPRSPSAGLWCPVFFVYIAYTLLPI

SEQ ID NO: 2068 - protein, 318 aa, Homo sapiens
LYFSLWKGVKTSGKVWIDAATQIFFSLGAGFGVLIAFASYNKFDNNCYRDALLTSSINCITSFVSGFAIFSILGYMAHEHKVNIEDVATEGAGLVFILYPEAISTLSGSTFWAVVFFVMLLALGLDSSMGGMEAVITGLADDFQVLKRHRKLFTFGVTFSTFLLALFCITKGGIYVLTLLDTFAAGTSILFAVLMEAIGVSWFYGVDRFSNDIQQMMGFRPGLYWRLCWKFVSPAFLLFVVVVSIINFKPLTYDDYIFPPWANWVGWGIALSSMVLVPIYVIYKFLSTQGSLWERLAYGITPENEHHLVAQRDIRQFQ

SEQ ID NO: 2069 - protein, 636 aa, Homo sapiens
MRGGRGAPFWLWPLPKLALLPLLWVLFQRTRPQGSAGPLQCYGVGPLGDLNCSWEPLGDLGAPSELHLQSQKYRSNKTQTVAVAAGRSWVAIPREQLTMSDKLLVWGTKAGQPLWPPVFVNLETQMKPNAPRLGPDVDFSEDDPLEATVHWAPPTWPSHKVLICQFHYRRCQEAAWTLLEPELKTIPLTPVEIQDLELATGYKVYGRCRMEKEEDLWGEWSPILSFQTPPSAPKDVWVSGNLCGTPGGEEPLLLWKAPGPCVQVSYKVWFWVGGRELSPEGITCCCSLIPSGAEWARVSAVNATSWEPLTNLSLVCLDSASAPRSVAVSSIAGSTELLVTWQPGPGEPLEHVVDWARDGDPLEKLNWVRLPPGNLSALLPGNFTVGVPYRITVTAVSASGLASASSVWGFREELAPLVGPTLWRLQDAPPGTPAIAWGEVPRHQLRGHLTHYTLCAQSGTSPSVCMNVSGNTQSVTLPDLPWGPCELWVTASTIAGQGPPGPILRLHLPDNTLRWKVLPGILFLWGLFLLGCGLSLATSGRCYHLRHKVLPRWVWEKVPDPANSSSGQPHMEQVPEAQPLGDLPILEVEEMEPPPVMESSQPAQATAPLDSGYEKHFLPTPEELGLLGPPRPQVLA

SEQ ID NO: 2070 - protein, 141 aa, Homo sapiens
METAGAATGQPASGLEAPGSTNDRLFLVKGGIFLGTVAAAGMLAGFITTLSLAKKKSPEWFNKGSMATAALPESGSSLALRALGWGSLYAWCGVGVISFAVWKALGVHSMNDFRSKMQSIFPTIPKNSESAVEWEETLKSK

SEQ ID NO: 2071 - protein, 378 aa, Homo sapiens
MDLAGLLKSQFLCHLVFCYVFIASGLIINTIQLFTLLLWPINKQLFRKINCRLSYCISSQLVMLLEWWSGTECTIFTDPRAYLKYGKENAIVVLNHKFEIDFLCGWSLSERFGLLGGSKVLAKKELAYVPIIGWMWYFTEMVFCSRKWEQDRKTVATSLQHLRDYPEKYFFLIHCEGTRFTEKKHEISMQVARAKGLPRLKHHLLPRTKGFAITVRSLRNVVSAVYDCTLNFRNNENPTLLGVLNGKKYHADLYVRRIPLEDIPEDDDECSAWLHKLYQEKDAFQEEYYRTGTFPETPMVPPRRPWTLVNWLFWASLVLYPFFQFLVSMIRSGSSLTLASFILVFFVASVGVRWMIGVTEIDKGSAYGNSDSKQKLND

SEQ ID NO: 2072 - protein, 542 aa, Homo sapiens
RRGGCGALGLLLLLLGAACLIPRSAQVRRLARCPATCSCTKESIICVGSSWVPRIVPGDISSLSLVNGTFSEIKDRMFSHLPSLQLLLLNSNSFTIIRDDAFAGLFHLEYLFIEGNKIETISRNAFRGLRDLTHLSLANNHIKALPRDVFSDLDSLIELDLRGNKFECDCKAKWLYLWLKMTNSTVSDVLCIGPPEYQEKKLNDVTSFDYECTTTDFVVHQTLPYQSVSVDTFNSKNDVYVAIAQPSMENCMVLEWDHIEMNFRSYDNITGQSIVGCKAILIDDQVFVVVAQLFGGSHIYKYDESWTKFVKFQDIEVSRISKPNDIELFQIDDETFFVIADSSKAGLSTVYKWNSKGFYSYQSLHEWFRDTDAEFVDIDGKSHLILSSRSQVPIILQWNKSSKKFVPHGDIPNMEDVLAVKSFRMQNTLYLSLTRFIGDSRVMRWNSKQFVEIQALPSRGAMTLQPFSFKDNHYLALGSDYTFSQIYQWDKEKQLFKKFKEIYVQAPRSFTAVSTDRRDFFFASSFKGKTKIFEHIIVDLSL

SEQ ID NO: 2073 - protein, 838 aa, Homo sapiens
MKKWSSTDLGAAADPLQKDTCPDPLDGDPNSRPPPAKPQLSTAKSRTRLFGKGDSEEAFPVDCPHEEGELDSCPTITVSPVITIQRPGDGPTGARLLSQDSVAASTEKTLRLYDRRSIFEAVAQNNCQDLESLLLFLQKSKKHLTDNEFKDPETGKTCLLKAMLNLHDGQNTTIPLLLEIARQTDSLKELVNASYTDSYYKGQTALHIAIERRNMALVTLLVENGADVQAAAHGDFFKKTKGRPGFYFGELPLSLAACTNQLGIVKFLLQNSWQTADISARDSVGNTVLHALVEVADNTADNTKFVTSMYNEILMLGAKLHPTLKLEELTNKKGMTPLALAAGTGKIGVLAYILQREIQEPECRHLSRKFTEWAYGPVHSSLYDLSCIDTCEKNSVLEVIAYSSSETPNRHDMLLVEPLNRLLQDKWDRFVKRIFYFNFLVYCLYMIIFTMAAYYRPVDGLPPFKMEKTGDYFRVTGEILSVLGGVYFFFRGIQYFLQRRPSMKTLFVDSYSEMLFFLQSLFMLATVVLYFSHLKEYVASMVFSLALGWTNMLYYTRGFQQMGIYAVMIEKMILRDLCRFMFVYIVFLFGFSTAVVTLIEDGKNDSLPSESTSHRWRGPCRPPDSSYNSLYSTCLELFKFTIGMGDLEFTENYDFKAVFIILLLAYVILTYILLLNMLIALMGETVNKIAQESKNIWKLQRAITILDTEKSFLKCMRKAFRSGKLLQVGYTPDGKDDYRWCFRVDEVNWTTWNTNVGIINEDPGNCEGVKRTLSFSLRSSRVSGRHWKNFALVPLLREASARDRQSAQPEEVYLRQFSGSLKPEDAEVFKSPAASGEK

SEQ ID NO: 2074 - protein, 255 aa, Homo sapiens
MHQRHPRARCPPLCVAGILACGFLLGCWGPSHFQQSCLQALEPQAVSSYLSPGAPLKGRPPSPGFQRQRQRQRRAAGGILHLELLVAVGPDVFQAHQEDTERYVLTNLNIGAELLRDPSLGAQFRVHLVKMVILTEPEGAPNITANLTSSLLSVCGWSQTINPEDDTDPGHADLVLYITRFDLELPDGNRQVRGVTQLGGACSPTWSCLITEDTGFDLGVTIAHEIGHSFGLEHDGAPGSGCGPSGHVMASDGAA

SEQ ID NO: 2075 - protein, 255 aa, Homo sapiens
MAEEAAQNISDDQERCLQAACCLSFGGELSVSTDKSWGLHLCSCSPPGGGLWVEVYANHVLLMSDGKCGCPWCALNGKAEDRESQSPSSSASRQKNIWKTTSEAALSVVNEKTQAVVNEKTQAPLDCDNSADRIPHKPFIIIARAWSSGGPRFHHRRLCATGTADSTFSALLQLQGTTSAAAPCSLKMEASCCVLRLLCCAEDVATGLLPGTVTMETPTKVARPTQTSSQRVPLWPISHFPTSPRSSHGLPPGIP

SEQ ID NO: 2076 - protein, 142 aa, Homo sapiens
MKSPHVLVFLCLLVALVTGNLVQFGVMIEKMTGKSALQYNDYGCYCGIGGSHWPVDQTDWCCHAHDCCYGRLEKLGCEPKLEKYLFSVSERGIFCAGRTTCQRLTCECDKRAALCFRRNLGTYNRKYAHYPNKLCTGPTPPC

SEQ ID NO: 2077 - protein, 372 aa, Homo sapiens
MGWRPGRGAPHFLDGMAAGQRHSSLSRLGSQAEGLLTSQTVGGQAETLLTSQTGRRPGRGCNLGTLGGQGRPPGVSWDKVRIPGVLQRLGVTYFVVAVLELLFAKPVPEHCASERSCLSLRDITSSWPQWLLILVLEGLWLGLTFLLPVPGCPTGYLGPGGIGDFGKYPNCTGGAAGYIDRLLLGDDHLYQHPSSAVLYHTEVAYDPEGILGTINSIVMAFLGVQAGKILLYYKARTKDILIRFTAWCCILGLISVALTKVSENEGFIPVNKNLWSLSYVTTLSSFAFFILLVLYPVVDVKGLWTGTPFFYPGMNSILVYVGHEVFENYFPFQWKLKDNQSHKEHLTQNIVATALWVLIAYILYRKKIFWKI

SEQ ID NO: 2078 - protein, 255 aa, Homo sapiens
MPGPLGLLCFLALGLLGSAGPSGAAPPLCAAPCSCDGDRRVDCSGKGLTAVPEGLSAFTQALDISMNNITQLPEDAFKNFPFLEELQLAGNDLSFIHPKALSGLKELKVLTLQNNQLKTVPSEAIRGLSALQSLRLDANHITSVPEDSFEGLVQLRHLWLDDNSLTEVPVHPLSNLPTLQALTLALNKISSIPDFAFTNLSSLVVLHLHNNKIRSLSQHCFDGLDNLETLDLNYNNLGEFPQAIKALPSLKELGF

SEQ ID NO: 2079 - protein, 435 aa, Homo sapiens
MEELLLLAKESSRSNHTIWFGHFTTSTILSPSPGIRSIMSSAIAYLCGHLHTLGGLMPVLHTRHFQGTLELEVGDWKDNRRYRIFAFDHDLFSFADLIFGKWPVVLITNPKSLLYSCGEHEPLERLLHSTHIRVLAFSLSSITSVTVKIDGVHLGQAVHVSGPIFVLKWNPRNYSSGTHNIEVIVQDSAGRSKSVHHIFSVQENNHLSFDPLASFILRTDHYIMARVLFVLIVLSQLTILIIFRYRGYPELKEPSGFINLTSFSLHVLSKINIFYYSVLLLTLYTVLGPWFFGEIIDGKFGCCFSFGIFVNGHFLQGSITFIIGILQLAFFNIPLMAYMCWSLLQRCFGHNFRSHLHQRKYLKIMPVHLLMLLLYIWQVYSCYFLYATYGTLAFLFSPLRTWLTLLTPVLIRYVWTLNSTKFGIFMVQLKSHLSS

SEQ ID NO: 2080 - protein, 731 aa, Homo sapiens
MTSPSSSPVFRLETLDGGQEDGSEADRGKLDFGSGLPPMESQFQGEDRKFAPQIRVNLNYRKGTGASQPDPNRFDRDRLFNAVSRGVPEDLAGLPEYLSKTSKYLTDSEYTEGSTGKTCLMKAVLNLKDGVNACILPLLQIDRDSGNPQPLVNAQCTDDYYRGHSALHIAIEKRSLQCVKLLVENGANVHARACGRFFQKGQGTCFYFGELPLSLAACTKQWDVVSYLLENPHQPASLQATDSQGNTVLHALVMISDNSAENIALVTSMYDGLLQAGARLCPTVQLEDIRNLQDLTPLKLAAKEGKIEIFRHILQREFSGLSHLSRKFTEWCYGPVRVSLYDLASVDSCEENSVLEIIAFHCKSPHRHRMVVLEPLNKLLQAKWDLLIPKFFLNFLCNLIYMFIFTAVAYHQPTLKKARAAPHLKAEVGNSMLLTGHILILLGGIYLLVGQLWYFWRRHVFIWISFIDSYFEILFLFQALLTVVSQVLCFLAIEWYLPLLVSALVLGWLNLLYYTRGFQHTGIYSVMIQKVILRDLLRFLLIYLVFLFGFAVALVSLSQEAWRPEAPTGPNATESVQPMEGQEDEGNGAQYRGILEASLELFKFTIGMGELAFQEQLHFRGMVLLLLLAYVLLTYILLLNMLIALMSETVNSVATDSWSIWKLQKAISVLEMENGYWWCRKKQRAGVMLTVGTKPDGSPDERWCFRVEEVNWASWEQTLPTLCEDPSGAGV

SEQ ID NO: 2081 - protein, 442 aa, Homo sapiens
ASCLCGSAPCILCSCCPASRNSTVSRLIFTFFLFLGVLVSIIMLSPGVESQLYKLPWVCEEGAGIPTVLQGHIDCGSLLGYRAVYRMCFATAAFFFFFTLLMLCVSSSRDPRAAIQNGFWFFKFLILVGLTVGAFYIPDGSFTNIWFYFGVVGSFLFILIQLVLLIDFAHSWNQRWLGKAEECDSRAWYAGLFFFTLLFYLLSIAAVALMFMYYTEPSGCHEGKVFISLNLTFCVCVSIAAVLPKVQDAQPNSGLLQASVITLYTMFVTWSALSSIPEQKCNPHLPTQLGNETVVAGPEGYETQWWDAPSIVGLIIFLLCTLFISLRSSDHRQVNSLMQTEECPPMLDATQQQQQVAACEGRAFDNEQDGVTYSYSFFHFCLVLASLHVMMTLTNWYKPGETRKMISTWTAVWVKICASWAGLLLYLWTLVAPLLLRNRDFS

SEQ ID NO: 2082 - protein, 255 aa, Homo sapiens
SQKSWIESTLTKRECVYIIPSSKDPHRCLPGCQICQQLVRCFCGRLVKQHACFTASLAMKYSDVKLGDHFNQAIEEWSVEKHTEQSPTDAYGVINFQGGSHSYRAKYVRLSYDTKPEVILQLLLKEWQMELPKLVISVHGGMQKFELHPRIKQLLGKGLIKAAVTTGAWILTGGVNTGVAKHVGDALKEHASRSSRKICTIGIAPWGVIENRNDLVGRDVVAPYQTLLNPLSKLNVLNNLHSHFILVDDGTVGKY

SEQ ID NO: 2083 - protein, 77 aa, Homo sapiens
MLYFLKIPYVTMSVWRNRLIFKFIVLSLVGNLLQILLAKSNIDQSMYLHLLIEIKQYLVSNVLKITLFKLELILRIM

SEQ ID NO: 2084 - protein, 256 aa, Homo sapiens
MPGPATDAGKIPFCDAKEEIRAGLESSEGGGGPERPGARGQRQNIVWRNVVLMSLLHLGAVYSLVLIPKAKPLTLLWAYFCFLLAALGVTAGAHRLWSHRSYRAKLPLRIFLAVANSMAFQNDIFEWSRDHRAHHKYSETDADPHNARRGFFFSHIGWLFVRKHRDVIEKGRKLDVTDLLADPVVRIQRNTQHIQKEGRALNQEAACEMLREWHQGHILKVTLPGLHILALLHTHCNHSEKCCLMLRALSVSLEVF

SEQ ID NO: 2085 - protein, 397 aa, Homo sapiens
MSVGRRRIKLLGILMMANVFIYFIMEVSKSSSQEKNGKGEVIIPKEKFWKISTPPEAYWNREQEKLNRQYNPILSMLTNQTGEAGRLSNISHLNYCEPDLRVTSVVTGFNNLPDRFKDFLLYLRCRNYSLLIDQPDKCAKKPFLLLAIKSLTPHFARRQAIRESWGQESNAGNQTVVRVFLLGQTPPEDNHPDLSDMLKFESEKHQDILMWNYRDTFFNLSLKEVLFLRWVSTSCPDTEFVFKGDDDVFVNTHHILNYLNSLSKTKAKDLFIGDVIHNAGPHRDKKLKYYIPEVVYSGLYPPYAGGGGFLYSGHLALRLYHITDQVHLYPIDDVYTGMCLQKLGLVPEKHKGFRTFDIEEKNKNNICSYVDLMLVHSRKPQEMIDIWSQLQSAHLKC

SEQ ID NO: 2086 - protein, 624 aa, Homo sapiens
MAEASRWHRGGASKHKLHYRKEVEITTTLQELLLYFIFLINLCILTFGMVNPHMYYLNKVMSSLFLDTSVPGEERTNFKSIRSITDFWKFMEGPLLEGLYWDSWYNNQQLYNLKNSSRIYYENILLGVPRVRQLKVRNNTCKVYSSFQSLMSECYGKYTSANEDLSNFGLQINTEWRYSTSNTNSPWHWGFLGVYRNGGYIFTLSKSKSETKNKFIDLRLNSWITRGTRVIFIDFSLYNANVNLFCIIRLVAEFPATGGILTSWQFYSVKLLRYVSYYDYFIASCEITFCIFLFVFTTQEVKKIKEFKSAYFKSIWNWLELLLLLLCFVAVSFNTYYNVQIFLLLGQLLKSTEKYSDFYFLACWHIYYNNIIAITIFFAWIKIFKFISFNKTMSQLSSTLSRCVKDIVGFAIMFFIIFFAYAQLGFLVFGSQVDDFSTFQNSIFAQFRIVLGDFNFAGIQQANPILGPIYFITFIFFVFFVLLNMFLAIINDTYSEVKADYSIGRRLDFELGKMIKQSYKNVLEKFRLKKAQKDEDKKTKGSGDLAEQARREGFDENEIQNAEQMKKWKERLEKKYYSMEIQDDYQPVTQEEFRELFLYAVELEKELHYINLKLNQVVRKVSAL

SEQ ID NO: 2087 - protein, 485 aa, Homo sapiens
MASSSTVPLGFHYETKYVVLSYLGLLSQEKLQEQHLSSPQGVQLDIASQSLDQEILLKVKTEIEEELKSLDKEISEAFTSTGFDRHTSPVFSPANPESSMEDCLAHLGEKVSQELKEPLHKALQMLLSQPVTYQAFRECTLETTVHASGWNKILVPLVLLRQMLLELTRRGQEPLSALLQFGVTYLEDYSAEYIIQQGGWGTVFSLESEEEEYPGITAEDSNDIYILPSDNSGQVSPPESPTVTTSWQSESLPVSLSASQSWHTESLPVSLGPESWQQIAMDPEEVKSLDSNGAGEKSENNSSNSDIVHVEKEEVPEGMEEAAVASVVLPARELQEALPEAPAPLLPHITATSLLGTREPDTEVITVEKSSPATSLFVELDEEEVKAATTEPTEVEEVVPALEPTETLLSEKEINAREESLVEELSPASEKKPVPPSEGKSRLSPAGEMKPMPLSEGKSILLFGGAAAVAILAVAIGVALALRKK

SEQ ID NO: 2088 - protein, 220 aa, Homo sapiens
MCSEIILRQEVLKDGFHRDLLIKVKFGESIEDLHTCRLLIKQDIPAGLYVDPYELASLRERNITEAVMVSENFDIEAPNYLSKESEVLIYARRDSQCIDCFQAFLPVHCRYHRPHSEDGEASIVVNNPDLLMFCDQAGSRRMIRFRFDSFDKTIEFPILKCWAHSEVAAPCALENEDICQWNKMKYKSVYKNVILQVPVGLTVHTSLVCSVTLLITILCS

SEQ ID NO: 2089 - protein, 584 aa, Homo sapiens
MEGFGGVGGRGTRGFAAKGVWRGRAEEGPVLGAAERGFMVSTGSRRRVFEGPGGGGLRWTPGKGTGRQRGAWGPRAEDGVRRRTLGMPRGSRRDVRPCGPAGSWGARGGRRDGPSRRRRGSATAAARHHVPPAPGGPFGPRAPAGSTRVPAGAGGAVEPTGAAAVARLARPAGGALPTAGAQGAGPARGRSGEGSEWARRGKGRPGPYQSPLGPVAEGQELKDKSRLRYPINGFQALVLTALLVGLGMSAGLPLGALPEMLLPLAFVATLTAFIFSLFLYMKAQVAPVSALAPGGNSGNPIYDFFLGRELNPRICFFDFKYFCELRPGLIGWVLINLALLMKEAELRGSPSLAMWLVNGFQLLYVGDALWHEEAVLTTMDITHDGFGFMLAFGDMAWVPFTYSLQAQFLLHHPQPLGLPMASVICLINATGYYIFRGANSQKNTFRKNPSDPRVAGLETISTATGRKLLVSGWWGMVRHPNYLGDLIMALAWSLPCGVSHLLPYFYLLYFTALLVHREARDERACRSTAWPGRSTAGVCLTASCPTSTEAAPPPQGHVPTHPPAHPGPGASTHLGLKGLHPTQP

SEQ ID NO: 2090 - protein, 179 aa, Homo sapiens
GHASPLPPSAAPTTDSTDSITGQNSRQREEELELIDQLRKHIEYRLKVSLPCDLGAALTDGVVLCHLANHVRPRSVPSIHVPSPAVPKLTMAKCRRNVENFLEACRKIGVPQDNLCSPSDILQLNLSVKRTVETLLSLGAHSEESSFVCLSLQLLGFVAFYCTVMLTLCVLYYWLFPAR

SEQ ID NO: 2091 - protein, 281 aa, Homo sapiens
MPVQLTTALRVVGTSLFALAVLGGILAAYVTGYQFIHTEKHYLSFGLYGAILGLHLLIQSLFAFLEHRRMRRAGQALKLPSPRRGSVALCIAAYQEDPDYLRKCLRSAQRISFPDLKVVMVVDGNRQEDAYMLDIFHEVLGGTEQAGFFVWRSNFHEAGEGETEASLQEGMDRVRDVVRASTFSCIMQKWGGKREVMYTAFKALGDSVDYIQVCDSDTVLDPACTIEMLRVLEEDPQVGGVGGDVQPPGKGMAVEDDQVQAAQVRATEAWSVHQRHVSREQ

SEQ ID NO: 2092 - protein, 483 aa, Homo sapiens
EMNICNKPSNKTAPEKSVWTAPAQPSGPSPELQGQRSRRNGWSWPPHPLQIVAWLLYLFFAVIGFGILVPLLPHHWVPAGYACMGAIFAGHLVVHLTAVSIDPADANVRDKSYAGPLPIFNRSQHAHVIEDLHCNLCNVDVSARSKHCSACNKCVCGFDHHCKWLNNCVGERNYRLFLHSVASALLGVLLLVLVATYVFVEFFVNPMRLRTNRHFEVLKNHTDVWFVFLPAAPVETQAPAILALAALLILLGLLSTALLGHLLCFHIYLMWHKLTTYEYIVQHRPPQEAKGVHRELESCPPKMRPIQEMEFYMRTFRHMRPEPPGQAGPAAVNAKHSRPASPDPTPGRRDCAGPPVQVEWDRKKPLPWRSPLLLLAMWGPQAPPCLCRKRGRGACIKCERLRPRIRRRGLGPPAAAPARRRIPRTPALCTPLALPAPTTRRRQSPWTRFQWRRRAWAAPLWPPRGAGADSPRWRGRRVRPPFS

SEQ ID NO: 2093 - protein, 297 aa, Homo sapiens
MEEPTAVEGQVQLPSPHQGSLRKAVAAALALDGESTMGHRKKKRKESRPESIIIYRSDNEKTDEEPGESEGGDQPKEEEGDDFLDYPVDDDMWNLPLDSRYVTLTGTITRGKKKGQMVDIHVTLTEKELQELTKPKESSRETTPEGRMACQMGADRGPHVVLWTLICLPVVFILSFVVSFYYGTITWYNIFLVYNEERTFWHKISYCPCLVLFYPVLIMAMASSLGLYAAVVQLSWSWEAWWQAARDMEKGFCGWLCSKLGLEDCSPYSIVELLESDNISSTLSNKDPIQEVETSTV

SEQ ID NO: 2094 - protein, 151 aa, Homo sapiens
MAFTFAAFCYMLTLVLCASLIFFVIWHIIAFDELRTDFKNPIDQGNPARARERLKNIERICCLLRKLVVPEYSIHGLFCLMFLCAAEWVTLGLNIPLLFYHLWRYFHRPADGSEVMYDAVSIMNADILNYCQKESWCKLAFYLLSFFYYLY

SEQ ID NO: 2095 - protein, 570 aa, Homo sapiens
MSVYNAVGEGPSPPQEVFVGEAVPTAAPRNVVVHGTATQLDVTWEPPPLDSQNGDIQGYKIYFWEAQGNLTERVKTLFLAENSVKLKNLTGYTAYMVSVAAFNAAGDGPRSTPTQGQTQQAAPSAPSSVKFSELTTTSVNVSWEAPQFPNGILEGYRLVYEPCSPVDGVSKIVTVDVKGNSPLWLKVKDLAEGVTYRFRIRAKTFTYGPEIEANVTTGPGEGAPGPPGVPIIVRYSSAIAIHWSSGDPGKGPITRYVIEARPSDEGLWDILIKDIPKEVSSYTFSMDILKPGVSYDFRVIAVNDYGFGTPSSPSQSVPAQKANPFYEEWWFLVVIALVGLIFILLLVFVLIIRGQSKKYAKKTDSGNSAKSGALGHSEMMSLDESSFPALELNNRRLSVKNSFCRKNGLYTRSPPRPSPGSLHYSDEDVTKYNDLIPAESSSLTEKPSEISDSQGSDSEYEVDSNHQKAHSFVNHYISDPTYYNSWRRQQKGISRAQAYSYTESDSGEPDHTTVTNSTSTQQGSLFRPKASRTPTPQNPPNPPSQQSTLYRPPSSLPGSRAPIAGFSSFV

SEQ ID NO: 2096 - protein, 575 aa, Homo sapiens
ARAKTNSWGCERPRPGPESTPAQSPTWGARLPTMRKIRANAIAILTVAWILGTFYYLWQDNRAHAASSGGRGAQRAGRRSEQLREDRTIPLIVTGTPSKGFDEKAYLSAKQLKAGEDPYRQHAFNQLESDKLSPDRPIRDTRHYSCPSVSYSSDLPATSVIITFHNEARSTLLRTVKSVLNRTPANLIQEIILVDDFSSDPEDCLLLTRIPKVKCLRNDRREGLIRSRVRGADVAAATVLTFLDSHCEVNTEWLPPMLQRVKEDHTRVVSPIIDVISLDNFAYLAASADLRGGFDWSLHFKWEQIPLEQKMTRTDPTRPIRTPVIAGGIFVIDKSWFNHLGKYDAQMDIWGGENFELSFRVWMCGGSLEIVPCSRVGHVFRKRHPYNFPEGNALTYIRNTKRTAEVWMDEYKQYYYEARPSAIGKAFGSVATRIEQRKKMNCKSFRWYLENVYPELTVPVKEALPGIIKQGVNCLESQGQNTAGDFLLGMGICRGSAKNPQPAQAWLFSDHLIQQQGKCLAATSTLMSSPGSPVILQMCNPREGKQVSLLASGPEAQQPEGPCLRVADLGRRAPD

SEQ ID NO: 2097 - protein, 112 aa, Homo sapiens
MTRCALLLLMVLMLGRVLVVPVTPIPTFQLRPQNSPQTTPRPAASESPSAAPTWPWAAQSHCSPTRHPGSRIVLSLDVPIGLLQILLEQARARAAREQATTNARILARVGHC

SEQ ID NO: 2098 - protein, 174 aa, Homo sapiens
MGQSLTPWGSACLACSCRGRTLLWAAPGVTLALLGLSLVHSLLLFMDEADAFLRKRATEEISKDLRATLNAFLYHMGQHSNKFMLVLASNLPEQFDCAINSRIDVMVHFDLPQQEERERLVRLHFDNCVLKPATEGKRRLKLAQFDYGRKCSEVARLTEGMSGREIAQLAVSWQ

SEQ ID NO: 2099 - protein, 408 aa, Homo sapiens [sequence omitted]

SEQ ID NO: 2100 - protein, 440 aa, Homo sapiens
MKLALLLPWACCCLCGSALATGFLYPFSAAALQQHGYPEPGAGSPGSGYASRRHWCHHTVTRTVSCQVQNGSETVVQRVYQSCRWPGPCANLVSYRTLIRPTYRVSYRTVTVLEWRCCPGFTGSNCDEECMNCTRLSDMSERLTTLEAKVLLLEAAERPSSPDNDLPAPESTPPTWNEDFLPDAIPLAHPVPRQRRPTGPAGPPGQTGPPGPAGPPGSKGDRGQTGEKGPAGPPGLLGPPGPRGLPGEMGRPGPPGPPGPAGNPGPSPNSPQGALYSLQPPTDKDNGDSRLASAIVDTVLAGVPGPRGPPGPPGPPGPRGPPGPPGTPGSQGLAGERGTVGPSGEPGVKGEEGEKAATAEGEGVQQLREALKILAERVLILEHMIGIHDPLASPGGSGQDAALRANLKMKRGGAQPDGVLAALLGPDPGQKSVDQASSRK

SEQ ID NO: 2101 - protein, 269 aa, Homo sapiens [sequence omitted]

SEQ ID NO: 2102 - protein, 629 aa, Homo sapiens
MGERRRKQPEPDAASAAGECSLLAAAESSTSLQSAGAGGGGVGDLERAARRQFQQDETPAFVYVVAVFSALGGFLFGYDTGVVSGAMLLLKRQLSLDALWQELLVSSTVGAAAVSALAGGALNGVFGRRAAILLASALFTAGSAVLAAANNKETLLAGRLVVGLGIGIASMTVPVYIAEVSPPNLRGRLVTINTLFITGGQFFASVVDGAFSYLQKDGWRYMLGLAAVPAVIQFFGFLFLPESPRWLIQKGQTQKARRILSQMRGNQTIDEEYDSIKNNIEEEEKEVGSAGPVICRMLSYPPTRRALIVGCGLQMFQQLSGINTIMYYSATILQMSGVEDDRLAIWLASVTAFTNFIFTLVGVWLVEKVGRRKLTFGSLAGTTVALIILALGFVLSAQVSPRITFKPIAPSGQNATCTRYSYCNECMLDPDCGFCYKMNKSTVIDSSCVPVNKASTNEAAWGRCENETKFKTEDIFWAYNFCPTPYSWTALLGLILYLVFFAPGMGPMPWTVNSEIYPLWARSTGNACSSGINWIFNVLVSLTFLHTAEYLTYYGAFFLYAGFAAVGLLFIYGCLPETKGKKLEEIESLFDNRLCTCGTSDSDEGRYIEYIRVKGSNYHLSDNDASDVE

SEQ ID NO: 2103 - protein, 861 aa, Homo sapiens
LRNSTFKNMQRRHTTLREKGRRQAIRGPAYMFNEKGTSLTPEEERFLDSAEYGNIPVVRKMLEESKTLNFNCVDYMGQNALQLAVGNEHLEVTELLLKKENLARVGDALLLAISKGYVRIVEAILNHPAFAQGQRLTLSPLEQELRDDDFYAYDEDGTRFSHDITPIILAAHCQEYEIVHILLLKGARIERPHDYFCKCNECTEKQRKDSFSHSRSRMNAYKGLASAAYLSLSSEDPVLTALELSNELARLANIETEFKNDYRKLSMQCKDFVVGVLDLCRDTEEVEAILNGDVNFQVWSDHHRPSLSRIKLAIKYEVKKFVAHPNCQQQLLTMWYENLSGLRQQSIAVKFLAVFGVSIGLPFLAIAYWIAPCSKLGRTLRSPFMKFVAHAVSFTIFLGLLVVNASDRFEGVKTLPNETFTDYPKQIFRVKTTQFSWTEMLIMKWVLGMIWSECKEIWEEGPREYVLHLWNLLDFGMLSIFVASFTARFMAFLKATEAQLYVDQHVQDDTLHNVSLPPEVAYFTYARDKWWPSDPQIISEGLYAIAVVLSFSRIAYILPANESFGPLQISLGRTVKDIFKFMVIFIMVFVAFMIGMFNLYSYYRGAKYNPAFTTVEESFKTLFWSIFGLSEVISVVLKYDHKFIENIGYVLYGVYNVTMVVVLLNMLIAMINNSYQEIEEDADVEWKFARAKLWLSYFDEGRTLPAPFNLVPSPKSFYYLIMRIKMCLIKLCKSKAKSCENDLEMGMLNSKFKKTRYQAGMRNSENLTANNTLSKPTRYQKIMKRLIKRYVLKAQVDRENDEVNEGELKEIKQDISSLRYELLEEKSQATGELADLIQQLSEKFGKNLNKDHLRVNKGKDI

SEQ ID NO: 2104 - protein, 335 aa, Homo sapiens
MLQGHSSVFQALLGTFFTWGMTAAGAALVFVFSSGQRRILDGSLGFAAGVMLAASYWSLLAPAVEMATSSGGFGAFAFFPVAVGFTLGAAFVYLADLLMPHLGAAEDPQTTLALNFGSTLMKKKSDPEGPALLFPESELSIRIDKSENGEAYQRKKAAATGLPEGPAVPVPSRGNLAQPGGSSWRRIALLILAITIHNVPEGLAVGVGFGAIEKTASATFESARNLAIGIGIQNFPEGLAVSLPLRGAGFSTWRAFWYGQLSGMVEPLAGVFGAFAVVLAEPILPYALAFAAGAMVYVVMDDIIPEAQISGNGKLASWASILGFVVMMSLDVGLG

SEQ ID NO: 2105 - protein, 425 aa, Homo sapiens
LESLKRWNEERGLWCEKGVQVLLTTVGAFAAFGLMTIAISTDYWLYTRALICNTTNLTAGGDDGTPHRGGGGASEKKDPGGLTHSGLWRICCLEGLKRGVCVKINHFPEDTDYDHDSAEYLLRVVRASSIFPILSAILLLLGGVCVAASRVYKSKRNIILGAGILFVAAGLSNIIGVIVYISANAGEPGPKRDEEKKNHYSYGWSFYFGGLSFILAEVIGVLAVNIYIERSREAHCQSRSDLLKAGGGAGGSGGSGPSAILRLPSYRFRYRRRSRSSSRSSEPSPSRDASPGGPGGPGFASTDISMYTLSRDPSKGSVAAGLAGAGGGGGGAVGAFGGAAGGAGGGGGGGGGAGAERDRGGASGFLTLHNAFPKEAGGGVTVTVTGPPAPPAPAPPAPSAPAPGTLAKEAAASNTNTLNRKTTPV

SEQ ID NO: 2106 - protein, 513 aa, Homo sapiens
MAPARTMARARLAPAGIPAVALWLLCTLGLQGTQAGPPPAPPGLPAGADCLNSFTAGVPGFVLDTNASVSNGATFLESPTVRRGWDCVRACCTTQNCNLALVELQPDRGEDAIAACFLINCLYEQNFVCKFAPREGFINYLTREVYRSYRQLRTQGFGGSGIPKAWAGIDLKVQPQEPLVLKDVENTDWRLLRGDTDVRVERKDPNQVELWGLKEGTYLFQLTVTSSDHPEDTANVTVTVLSTKQTEDYCLASNKVGRCRGSFPRWYYDPTEQICKSFVYGGCLGNKNNYLREEECILACRGVQGPSMERRHPVCSGTCQPTQFRCSNGCCIDSFLECDDTPNCPDASDEAACEKYTSGFDELQRIHFPSDKGHCVDLPDTGLCKESIPRWYYNPFSEHCARFTYGGCYGNKNNFEEEQQCLESCRGISKKDVFGLRREIPIPSTGSVEMAVAVFLVICIVVVVAILGYCFFKNQRKDFHGHHHHPPPTPASSTVSTTEDTEHLVYNHTTRPL

SEQ ID NO: 2107 - protein, 357 aa, Homo sapiens
MATTVPDGCRNGLKSKYYRLCDKAEAWGIVLETVATAGVVTSVAFMLTLPILVCKVQDSNRRKMLPTQFLFLLGVLGIFGLTFAFIIGLDGSTGPTRFFLFGILFSICFSCLLAHAVSLTKLVRGRKPLSLLVILGLAVGFSLVQDVIAIEYIVLTMNRTNVNVFSELSAPRRNEDFVLLLTYVLFLMALTFLMSSFTFCGSFTGWKRHGAHIYLTMLLSIAIWVAWITLLMLPDFDRRWDDTILSSALAANGWVFLLAYVSPEFWLLTKQRNPMDYPVEDAFCKPQLVKKSYGVENRAYSQEEITQGFEETGDTLYAPYSTHFQLQNQPPQKEFSIPRAHAWPSPYKDYEVKKEGS

SEQ ID NO: 2108 - protein, 413 aa, Homo sapiens
MSNVSGILETAGVPLVSANWPQPSPPPAVPAGPQMDHMGNSSQGAPWLFLTSALARGVSGIFVWTALVLTCHQIYLHLRSYTVPQEQRYIIRLLLIVPIYAFDSWLSLLLLGDHQYYVYFDSVRDCYEAFVIYSFLSLCFQYLGGEGAIMAEIRGKPIKSSCLYGTCCLRGMTYSIGFLRFCKQATLQFCLVKPVMAVTTIILQAFGKYHDGDFNVRSGYLYVTLIYNASVSLALYALFLFYFTTRELLRPFQPVLKFLTIKAVIFLSFWQGLLLAILERCGVIPEVETSGGNKLGAGTLAAGYQNFIICVEMLFASVALRYAFPCQVYAEKKENSPAPPAPMQSISSGIRETVSPQDIVQDAIHNFSPAYQHYTQQATHEAPRPGTHPSGGSGGSRKSRSLEKRMLIPSEDL

SEQ ID NO: 2109 - protein, 99 aa, Homo sapiens
MLSLEETEAGEEGSRITLPGGGGCRRGDFPWDDEDFRSLALLGAGVAMGFFYLYFRDPGREITWKHFVQYYLARGLVDRLEVVNKQSVRVIPAPGTSSE

SEQ ID NO: 2110 - protein, 675 aa, Homo sapiens
MAAETLLSSLLGLLLLGLLLPASLTGGVGSLNLEELSEMRYGIEILPLPVMGGQSQSSDVVIVSSKYKQRYECRLPAGAIHFQREREEETPAYQGPGIPELLSPMRDAPCLLKTKDWWTYEFCYGRHIQQYHMEDSEIKGEVLYLGYYQSAFDWDDETAKASKQHRLKRYHSQTYGNGSKCDLNGRPREAEVRFLCDEGAGISGDYIDRVDEPLSCSYVLTIRTPRLCPHPLLRPPPSAAPQAILCHPSLQPEEYMAYVQRQAVDSKQYGDKIIEELQDLGPQVWSETKSGVAPQKMAGASPTKDDSKDSDFWKMLNEPEDQAPGGEEVPAEEQDPSPEAADSASGAPNDFQNNVQVKVIRSPADLIRFIEELKGGTKKGKPNIGQEQPVDDAAEVPQREPEKERGDPERQREMEEEEDEDEDEDEDEDERQLLGEFEKELEGILLPSDRDRLRSEVKAGMERELENIIQEASPALPPTEKELDPDGLKKESERDRAMLALTSTLNKLIKRLEEKQSPELVKKHKKKRVVPKKPPPSPQPTEEDPEHRVRVRVTKLRLGGPNQDLTVLEMKRENPQLKQIEGLVKELLEREGLTAAGKIEIKIVRPWAEGTEEGARWLTDEDTRNLKEIFFNILVPGAEEAQKERQRQKELESNYRRVWGSPGGEGTGDLDEFDF

SEQ ID NO: 2111 - protein, 381 aa, Homo sapiens
IFSNLSLDERCLSASLVCKYWRDLCLDFQFWKQLDLSSRQQVTDELLEKIASRSQNIIEINISDCRSMSDNGVCVLAFKCPGLLRYTAYRCKQLSDTSIIAVASHCPLLQKVHVGNQDKLTDEGLKQLGSKCRELKDIHFGQCYKISDEGMIVIAKGCLKLQRIYMQENKLVTDQSVKAFAEHCPELQYVGFMGCSVTSKGVIHLTKLRNLSSLDLRHITELDNETVMEIVKRCKNLSSLNLCLNWIINDRCVEVIAKEGQNLKELYLVSCKITDYALIAIGRYSMTIETVDVGWCKEITDQGATLIAQSSKSLRYLGLMRCDKVRVDYQVVCFLHISIVNSLMSYPLSFSISTPVYYILYIHFICIYAIIAMHCLPAFVN

SEQ ID NO: 2112 - protein, 779 aa, Homo sapiens
MTAAAASNWGLITNIVNSIVGVSVLTMPFCFKQCGIVLGALLLVFCSWMTHQSCMFVKSASLSKRRTYAGLAFHAYGKAGKMLVETSMIGLMLGTCIAFYVVIGDLGSNFFARLFGFQVGGTFRMFLLFAVSLCIVLPLSLQRNMMASIQSFSAMALLFYTVFMFVIVLSSLKHGLFSGQWLRRVSYVRWEGVFRCIPIFGMSFACQSQVLPTYDSLDEPSVKTMSSIFASSLNVVTTFYVMVGFFGYVSFTEATAGNVLMHFPSNLVTEMLRVGFMMSVAVGFPMMILPCRQALSTLLCEQQQKDGTFAAGGYMPPLRFKALTLSVVFGTMVGGILIPNVETILGLTGATMGSLICFICPALIYKKIHKNALSSQVVLWVGLGVLVVSTVTTLSVSEEVPEDLAEEAPGGRLGEAEGLMKVEAARLSAQDPVVAVAEDGREKPKLPKEREELEQAQIKGPVDVPGREDGKEAPEEAQLDRPGQGIAVPVGEAHRHEPPVPHDKVVVDEGQDREVPEENKPPSRHAGGKAPGVQGQMAPPLPDSEREKQEPEQGEVGKRPGQAQALEEAGDLPEDPQKVPEADGQPAVQPAKEDLGPGDRGLHPRPQAVLSEQQNGLAVGGGEKAKGGPPPGNAAGDTGQPAEDSDHGGKPPLPAEKPAPGPGLPPEPREQRDVERAGGNQAASQLEGKASALQPPASGPGSGSPLPQPWGDAQVILGSPARPPFSFQPPAEQTPRRAFCSLPISSLLSGNLLSALLPFKHLRHRHMACDYRFISLAPL

SEQ ID NO: 2113 - protein, 220 aa, Homo sapiens
ATCVYFVLWLPSSSPSWVSTLIKCLPIFCLWLFLLAHGLGFLLAHPSATRIFVGLVFSAVGDAFLIWQDQGYFVHGLLMFAVTHMFYASAFGMQPLALRTGLVMAALSGLCYALLYPCLSGAFTYLVGVYVALIGFMGWRAMAGLRLAGADWRWTELAAGSGALFFIISDLTIALNKFCFPVPYSRALIMSTYYVAQMLVALSAVESREPVEHYRLTKAN

SEQ ID NO: 2114 - protein, 226 aa, Homo sapiens
MDQALSLWFLLGWIGGDSCNLIGSFLADQLPLQTYTAVYYVLADLVMLTLYFYYKFRTRPSLLSAPINSVLLFLMGMACATPLLSAAGPVAAPREAFRGRALLSVESGSKPFTRQEVIGFVIGSISSVLYLLSRLPQIRTNFLRKSTQGISYSLFALVMLGNTLYGLSVLLKNPEEGQSEGSYLLHHLPWLVGSLGVLLLDTIISIQFLVYRRSTAASELEPLLPS

SEQ ID NO: 2115 - protein, 114 aa, Homo sapiens
MRCWVILIILGIVFLLMPLSFLPIYTNIPRSERAPINTLLSSTLPGTLDQSAALSPALARRPAAWYARGVAVGAQCVLGVEGSCSACDDLYSQDKDAVCQTVLLRRSSRERERV

SEQ ID NO: 2116 - protein, 484 aa, Homo sapiens
MKKGIRYETSRKTSYIFQQPQHGPWQTRMRKISNHGSLRVAKVAYPLGLCVGVFIYVAYIKWHRATATQAFFSITRAAPGARWGQQAHSPLGTAADGHEVFYGIMFDAGSTGTRVHVFQFTRPPRETPTLTHETFKALKPGLSAYADDVEKSAQGIRELLDVAKQDIPFDFWKATPLVLKATAGLRLLPGEKAQKLLQKVKKVFKASPFLVGDDCVSIMNGTDEGVSAWITINFLTGSLKTPGGSSVGMLDLGGGSTQIAFLPRVEGTLQASPPGYLTALRMFNRTYKLYSYSYLGLGLMSARLAILGGVEGQPAKDGKELVSPCLSPSFKGEWEHAEVTYRVSGQKAAASLHELCAARVSEVLQNRVHRTEEVKHVDFYAFSYYYDLAAGVGLIDAEKGGSLVVGDFEIAAKYVCRTLETQPQSSPFSCMDLTYVSLLLQEFGFPRSKVLKLTRKIDNVETSWALGAIFHYIDSLNRQKSPAS

SEQ ID NO: 2117 - protein, 316 aa, Homo sapiens
EPLAPEPPARPSKVEQLQDETNHLRKELESVGRQLQAEVENNQMLSLLNRRQEERLQEQEGWQEEQERLLDKNNENKSALQLEQQVKELKLGEPGSYQPVETAAKAQLSLMALPGEGDGGGHLDSEQEAPRPMPNIPGDLESREAMVAFFNSAGANAQEEQRVCCQPLAHPVASSQKKPEVAAPAPETGGESVCGETHQALQGAMEKLQESTSARGQCQRRSTGRGGHRQAGPGPGGDEEMLCTCTQVSSAGRGMGMLTVVLVVSLMMLSASFSTWCMRSISSCHCAYSAHSSISVFWFPREYILASGSEMMNSVV

SEQ ID NO: 2118 - protein, 459 aa, Homo sapiens
MADSGLREPQEDSQKDLENDPSVNSQAQETTIIASNAEEAEILHSACGLSKDHQEVETEGPESADTGDKSESPDEANVGKHPKDKTEDENKQSFLDGGKGHHLPSENLGKEPLDPDPSHSPSDKVGRADAHLGSSSVALPKEASDGTGASQEPPTTDSQEAQSPGHSSAGQEGEDTLRRRLLAPEAGSHPQQTQKLEEIKENAQDTMRQINKKGFWSYGPVILVVLVVAVVASSVNSYYSSPAQQVPKNPALEAFLAQFSQLEDKFPGQSSFLWQRGRKFLQKHLNASNPTEPATIIFTAAREGRETLKCLSHHVADAYTSSQKVSPIQIDGAGRTWQDSDTVKLLVDLELSYGFENGQKAAVVHHFESFPAGSTLIFYKYCDHENAAFKDVALVLTVLLEEETLEASVGPRETEEKVRDLLWAKFTNSDTPTSFNHMDSDKLSGLWSRISHLVLPVQP

SEQ ID NO: 2119 - protein, 164 aa, Homo sapiens
GARGARTWRPARGRGQGRLLRRAAAPRAGAAASMAPSPRTGSRQDATALPSMSSTFWAFMILASLLIAYCSQLAAGTCEIVTLDRDSSQPRRTIARQTARCACRKGQIAGTTRARPACVDARIIKTKQWCDMLPCLEGEGCDLLINRSGWTCTQPGGRIKTTTV

SEQ ID NO: 2120 - protein, 625 aa, Homo sapiens
MCETSAFYVPGVAPINFHQNDPVEIKAVKLTSSRTQLPYEYYSLPFCQPSKITYKAENLGEVLRGDRIVNTPFQVLMNSEKKCEVLCSQSNKPVTLTVEQSRLVAERITEDYYVHLIADNLPVATRLELYSNRDSDDKKKEKDVQFEHGYRLGFTDVNKIYLHNHLSFILYYHREDMEEDQEHTYRVVRFEVIPQSIRLEDLKADEKSSCTLPEGTNSSPQEIDPTKENQLYFTYSVHWEESDIKWASRWDTYLTMSDVQIHWFSIINSVVVVFFLSGILSMIIIRTLRKDIANYNKEDDIEDTMEESGWKLVHGDVFRPPQYPMILSSLLGSGIQLFCMILIVIFVAMLGMLSPSSRGALMTTACFLFMFMGVFGGFSAGRLYRTLKGHRWKKGAFCTATLYPGVVFGICFVLNCFIWGKHSSGAVPFPTMVALLCMWFGISLPLVYLGYYFGFRKQPYDNPVRTNQIPRQIPEQRWYMNRFVGILMAGILPFGAMFIELFFIFSAIWENQFYYLFGFLFLVFIILVVSCSQISIVMVYFQLCAEDYRWWWRNFLVSGGSAFYVLVYAIFYFVNKLDIVEFIPSLLYFGYTALMVLSFWLLTGTIGFYAAYMFVRKIYAAVKID

SEQ ID NO: 2121 - protein, 363 aa, Homo sapiens
GDDKYGRKIIVFSACRMPPSHQLDHSKLLGYLKHTLDQYVESDYTLLYLHHGLTSDNKPSLSWLRDAYREFDRKYKKNIKALYIVHPTMFIKTLLILFKPLISFKFGQKIFYVNYLSELSEHVKLEQLGIPRQVLKYDDFLKSTQKSPATAPKPMPPRPPLPNQQFGVSLQHLQEKNPEQEPIPIVLRETVAYLQAHALTTEGIFRRSANTQVVREVQQKYNMGLPVDFDQYNELHLPAVILKTFLRELPEPLLTFDLYPHVVGFLNIDESQRVPATLQVLQTLPEENYQVLRFLTAFLVQISAHSDQNKMTNTNLAVVFGPNLLWAKDAAITLKAINPINTFTKFLLDHQGELFPSPDPSGL

SEQ ID NO: 2122 - protein, 255 aa, Homo sapiens
YRIPSLFKTTRPKKVGISILNSFSIVWSTVCSIFFMSTLTVTNPKLIFQASLANAQILIPTNQASVSSMLLEGHTLLALATTMYSPGGVSQVVQNEENENCLKKVDPQLLKMALTPYPKLKTALFPQCTPPSVLPSDITIYHLIQSLSPFDPSRLFGWQSANTLAIGDAWSHLPHFSSPDLVNKYAIVERLNFAYYLHNGRPSFAFGTFLVQELIKSKTPKQLIQQVGNEAYVIGLSSFHIPSIGAACVCFLELL

SEQ ID NO: 2123 - protein, 255 aa, Homo sapiens
FSEIEKGGCGDPGIPAYGKRTGSSFLHGDTLTFECPAAFELGERVITCQQNNQWSGNKPSCVFSCFFNFTASSGIILSPNYPEEYGNNMNCVWLIISEPGSRIHLIFNDFDVEPQFDFLAVKDDGISDITVLGTFSGNEVPSQLASSGHIVRLEFQSDHSTTGRGFNITYTTFGQNECHDPGIPINGRRFGDRFLLGSSVSFHCDDGFVKTQGSESITCILQDGNVVWSSTVPRCEAPCGGHLTASSGVILPPGW

SEQ ID NO: 2124 - protein, 340 aa, Homo sapiens
MADTATTASAAAASAASASSDAPPFQLGKPRFQQTSFYGRFRHFLDIIDPRTLFVTERRLREAVQLLEDYKHGTLRPGVTNEQLWSAQKIKQAILHPDTNEKIFMPFRMSGYIPFGTPIVVGLLLPNQTLASTVFWQWLNQSHNACVNYANRNATKPSPASKFIQGYLGAVISAVSIAVGLNVLVQKANKFTPATRLLIQRFVPFPAVASANICNVVLMRYGELEEGIDVLDSDGNLVGSSKIAARHALLETALTRVVLPMPILVLPPIVMSMLEKTALLQARPRLLLPVQSLVCLAAFGLALPLAISLFPQMSEIETSQLEPEIAQATSSRTVVYNKGL

SEQ ID NO: 2125 - protein, 326 aa, Homo sapiens
MAGPNQLCIRRWTTKHVAVWLKDEGFFEYVDILCNKHRLDGITLLTLTEYDLRSPPLEIKVLGDIKRLMLSVRKLQKIHIDVLEEMGYNSDSPMGSMTPFISALQSTDWLCNGELSHDCDGPITDLNSDQYQYMNGKNKHSVRRLDPEYWKTILSCIYVFIVFGFTSFIMVIVHERVPDMQTYPPLPDIFLDSVPRIPWAFAMTEVCGMILCYIWLLVLLLHKHRSILLRRLCSLMGTVFLLRCFTMFVTSLSVPGQHLQCTGKIYGSVWEKLHRAFAIWSGFGMTLTGVHTCGDYMFSGHTVVLTMLNFFVTECKYLFSASMRIR

SEQ ID NO: 2126 - protein, 187 aa, Homo sapiens
MAPRPLGPLVLALGGAAAVLGSVLFILWKTYFGRGRERRWDRGEAWWGAEAARLPEWDEWDPEDEEDEEPALEELEQREVLVLGLDGAGKSTFLRVLSGKPPLEGHIPTWGFNSVRLPTKDFEVDLLEIGGSQNLRFYWKEFVSEVDVLVFVVDSADRLRLPWARQELHKLLDKDPDLPVVVVANKQ

SEQ ID NO: 2127 - protein, 265 aa, Homo sapiens
MSEEVTYADLQFQNSSEMEKIPEIGKFGEKAPPAPSHVWRPAALFLTLLCLLLLIGLGVLASMFHVTLKIEMKKMNKLQNISEELQRNISLQLMSNMNISNKIRNLSTTLQTIATKLCRELYSKEQEHKCKPCPRRWIWHKDSCYFLSDDVQTWQESKMACAAQNASLLKINNKNALEFIKSQSRSYDYWLGLSPEEDSTRGMRVDNIINSSAWVIRNAPDLNNMYCGYINRLYVQYYHCTYKKRMICEKMANPVQLGSTYFREA

SEQ ID NO: 2128 - protein, 528 aa, Homo sapiens
MSRSPQRALPPGALPRLLQAAPAAAPRALLPQWPRRPGRRWPASPLGMKVFRRKALVLCAGYALLLVLTMLNLLDYKWHKEPLQQCNPDGPLGAAAGAAGGLGAPRAASGRAAPCSCPFGPPHSLPPSRCRRRGGLQPRQGWRGLRPLQAMALGAPGVGDKRQLVYVFTTWRSGSSFFGELFNQNPEVFFLYEPVWHVWQKLYPGDAVSLQGAARDMLSALYRCDLSVFQLYSPAGSGGRNLTTLGIFGAATNKVVCSSPLCPAYRKEVVGLVDDRVCKKCPPQRLARFEEECRKYRTLVIKGVRVFDVAVLAPLLRDPALDLKVIHLVRDPRAVASSRIRSRHGLIRESLQVVRSRDPRAHRMPFLEAAGHKLGAKKEGVGGPADYHALGAMEVICNSMAKTLQTALQPPDWLQGHYLVVRYEDLVGDPVKTLRRVYDFVGLLVSPEMEQFALNMTSGSGSSSKPFVVSARNATQAANAWRTALTFQQIKQVEEFCYQPMAVLGYERVNSPEEVKDLSKTLLRKPRL

SEQ ID NO: 2129 - protein, 212 aa, Homo sapiens
MIGYTLKYVAFNGTKVGKQIVENFSPNQTKFTVQRTDPVSRYRFTLSARTQVGSGEAVTEESPAPPNEAYTNNQADIATQGWFIGLMCAIALLVLILLIVCFIKRSRGGKYPVREKKDVPLGPEDPKEEDGSFDYSDEDNKPLQGSQTSLDGTIKQQESDDSLVDYGEGGEGQFNEDGSFIGQYTVKKDKEETEGNESSEATSPVNAIYSLA

SEQ ID NO: 2130 - protein, 30 aa, Homo sapiens
MPPHSGQSRGRKPGSCLLLLLLLLLLLLLL

SEQ ID NO: 2131 - protein, 560 aa, Homo sapiens
MDVKERKPYRSLTRRRDAERRYTSSSADSEEGKAPQKSYSSSETLKAYDQDARLAYGSRVKDIVPQEAEEFCRTGANFTLRELGLEEVTPPHGTLYRTDIGLPHCGYSMGAGSDADMEADTVLSPEHPVRLWGRSTRSGRSSCLSSRANSNLTLTDTEHENTETDHPGGLQNHARLRTPPPPLSHAHTPNQHHAASINSLNRGNFTPRSNPSPAPTDHSLSGEPPAGGAQEPAHAQENWLLNSNIPLETRNLGKQPFLGTLQDNLIEMDILGASRHDGAYSDGHFLFKPGGTSPLFCTTSPGYPLTSSTVYSPPPRPLPRSTFARPAFNLKKPSKYCNWKCAALSAIVISATLVILLAYFVAMHLFGLNWHLQPMEGQMYEITEDTASSWPVPTDVSLYPSGGTGLETPDRKGKGTTEGKPSSFFPEDSFIDSGEIDVGRRASQKIPPGTFWRSQVFIDHPVHLKFNVSLGKAALVGIYGRKGLPPSHTQFDFVELLDGRRLLTQEARSLEGTPRQSRGTVPPSSHETGFIQYLDSGIWHLAFYNDGKESEVVSFLTTAI

SEQ ID NO: 2132 - protein, 255 aa, Homo sapiens
MERSPGEGPSPSPMDQPSAPSDPTDQPPAAHAKPDPGSGGQPAGPGAAGEALAVLTSFGRRLLVLIPVYLAGAVGLSVGFVLFGLALYLGWRRVRDEKERSLRAARQLLDDEEQLTAKTLYMSHRELPAWVSFPDVEKAEWLNKIVAQVWPFLGQYMEKLLAETVAPAVRGSNPHLQTFTFTRVELGEKPLRIIGVKVHPGQRKEQILLDLNISYVGDVQIDVEVKKYFCKAGVKGMQLHGVLRVILEPLIGDLP

SEQ ID NO: 2133 - protein, 314 aa, Homo sapiens
MPKGGAPPWIMALMFTGHLLFLALLMFAFSTFEESVSNYSEWAVFTDDIDQFKTQKVQDFRPNQKLKKSMLHPSLYFDAGEIQAMRQKSRASHLHLFRAIRSAVTVMLSNPTYYLPPPKHADFAAKWNEIYGNNLPPLALYCLLCPEDKVAFEFVLEYMDRMVGYKDWLVENAPGDEVPIGHSLTGFATAFDFLYNFKKSLSSEGHHMDLPDVVITSLPGSGAEILKQLFFNSSDFLYIRVPTAYIDIPETELEIDSFVDACEWKVSDIRSGHFRLLRGWLQSLVQDTKLHLQNIHLHEPNRGKLAQYFAMNKD

SEQ ID NO: 2134 - protein, 255 aa, Homo sapiens
LLELIPYAPTLSWTACPPAMAGPRGLLPLCLLAFCLAGFSFVRGQVLFKGCDVKTTFVTHVPCTSCAAIKKQTCPSGWLRELPDQITQDCRYEVQLGGSMVSMSGCRRKCRKQVVQKACCPGYWGSRCHECPGGAETPCNGHGTCLDGMDRNGTCVCQENFRGSACQECQDPNRFGPDCQSVCSCVHGVCNHGPRGDGSCLCFAGYTGPHCDQELPVCQELRCPQNTQCSAEAPSCRCLPGYTQQGSECRAPNPC

SEQ ID NO: 2135 - protein, 553 aa, Homo sapiens
MRAPGRPALRPLPLPPLLLLLLAAPWGRAVPCVSGGLPKPANITFLSINMKNVLQWTPPEGLQGVKVTYTVQYFIYGQKKWLNKSECRNINRTYCDLSAETSDYEHQYYAKVKAIWGTKCSKWAESGRFYPFLETQIGPPEVALTTDEKSISVVLTAPEKWKRNPEDLPVSMQQIYSNLKYNVSVLNTKSNRTWSQCVTNHTLVLTWLEPNTLYCVHVESFVPGPPRRAQPSEKQCARTLKDQSSEFKAKIIFWYVLPVSITVFLFSVMGYSIYRYIHVGKEKHPANLILIYGNEFDKRFFVPAEKIVINFITLNISDDSKISHQDMSLLGKSSDVSSLNDPQPSGNLRPPQEEEEVKHLGYASHLMEIFCDSEENTEGTSLTQQESLSRTIPPDKTVIEYEYDVRTTDICAGPEEQELSLQEEVSTQGTLLESQAALAVLGPQTLQYSYTPQLQDLDPLAQEHTDSEEGPEEEPSTTLVDWDPQTGRLCIPSLSSFDQDSEGCEPSEGDGLGEEGLLSRLYEEPAPDRPPGENETYLMQFMEEWGLYVQMEN

SEQ ID NO: 2136 - protein, 489 aa, Homo sapiens
MALLFLLPLVMQGVSRAEMGTADLGPSSVPTPTNVTIESYNMNPIVYWEYQIMPQVPVFTVEVKNYGVKNSEWIDACINISHHYCNISDHVGDPSNSLWVRVKARVGQKESAYAKSEEFAVCRDGKIGPPKLDIRKEEKQIMIDIFHPSVFVNGDEQEVDYDPETTCYIRVYNVYVRMNGSEIQYKILTQKEDDCDEIQCQLAIPVSSLNSQYCVSAEGVLHVWGVTTEKSKEVCITIFNSSIKGSLWIPVVAALLLFLVLSLVFICFYIKKINPLKEKSIILPKSLISVVRSATLETKPESKYVSLITSYQPFSLEKEVVCEEPLSPATVPGMHTEDNPGKVEHTEELSSITEVVTTEENIPDVVPGSHLTPIERESSSPLSSNQSEPGSIALNSYHSRNCSESDHSRNGFDTDSSCLESHSSLSDSEFPPNNKGEIKTEGQELITVIKAPTSFGYDKPHVLVDLLVDDSGKESLIGYRPTEDSKEFS

SEQ ID NO: 2137 - protein, 255 aa, Homo sapiens
PPPASRRLRAPGSRPRLAPCTRRAAQPAHARMAPRAAGGAPLSARAAAASPPPFQTPPRCPVPLLLLLLLGAARAGALEIQRRFPSPTPTNNFALDGAAGTVYLAAVNRLYQLSGANLSLEAEAAVGPVPDSPLCHAPQLPQASCEHPRRLTDNYNKILQLDPGQGLVVVCGSIYQGFCQLRRRGNISAVAVRFPPAAPPAEPVTVFPSMLNVAANHPNASTVGLVLPPAAGAGGSRLLVGATYTGYGSSFFPRN

SEQ ID NO: 2138 - protein, 422 aa, Homo sapiens
MGMTRMLLECSLSDKLCVIQEKQYEVIIVPTLLVTIFLILLGVILWLFIREQRTQQQRSGPQGIAPVPPPRDLSWEAGHGGNVALPLKETSVENFLGATTPALAKLQVPREQLSEVLEQICSGSCGPIFRANMNTGDPSKPKSVILKALKEPAGLHEVQDFLGRIQFHQYLGKHKNLVQLEGCCTEKLPLYMVLEDVAQGDLLSFLWTCRRDVMTMDGLLYDLTEKQVYHIGKQVLLALEFLQEKHLFHGDVAARNILMQSDLTAKLCGLGLAYEVYTRGAISSTQTIPLKWLAPERLLLRPASIRADVWSFGILLYEMVTLGAPPYPEVPPTSILEHLQRRKIMKRPSSCTHTMYSIMKSCWRWREADRPSPRELRLRLEAAIKTADDEAVLQVPELVVPELYAAVAGIRVESLFYNYSML

SEQ ID NO: 2139 - protein, 458 aa, Homo sapiens
MAWASRLGLLLALLLPVVGASTPGTVVRLNKAALSYVSEIGKAPLQRALQVTVPHFLDWSGEALQPTRIRILNVHVPRLHLKFIAGFGVRLLAAANFTFKVFRAPEPLELTLPVELLADTRVTQSSIRTPVVSISACSLFSGHANEFDGSNSTSHALLVLVQKHIKAVLSNKLCLSISNLVQGVNVHLGTLIGLNPVGPESQIRYSMVSVPTVTSDYISLEVNAVLFLLGKPIILPTDATPFVLPRHVGTEGSMATVGLSQQLFDSALLLLQKAGALNLDITGQLRSDDNLLNTSALGRLIPEVARQFPEPMPVVLKVRLGATPVAMLHTNNATLRLQPFVEVLATASNSAFQSLFSLDVVVNLRLQLSVSKVKLQGTTSVLGDVQLTVASSNVGFIDTDQVRTLMGTVFEKPLLDHLNALLAMGIALPGVVNLHYVAPEIFVYEGYVVISSGLFYQS

SEQ ID NO: 2140 - protein, 137 aa, Homo sapiens
MQPWALPTVGELWVCGRPGAALRWSLVLSPRLEPSGVISAHCNLHLLASSDSSASASRLCQRVMMPSRTNLATGIPSSKVKYSRLSSTDDGYIDLQFKKTPPKIPYKAIALATVLFLIGAFLIIIGSLLLSGYISKG

SEQ ID NO: 2141 - protein, 517 aa, Homo sapiens
MGRKSKKWGKKVSRYEGKVRLKKVPAKKLVPAWKEKVLWALLAVLLASWRLWAIKDFQECTWQVVLNEFKRVGESGVSDSFFEQEPVDTVSSLFHMLVDSPIDPSEKYLGFPYYLKINYSCEEKPSEDLVRMGHLTGLKPLVLVTFQSPVNFYRWKIEQLQIQMEAAPFRSKGGPGGGGRDRNLAGMNINGFLKRDRDNNIQFTVGEELFNLMPQYFVGVSSRPLWHTVDQSPVLILGGIPNEKYVLMTDTSFKDFSLVEVNGVGQMLSIDSCWVGSFYCPHSGFTATIYDTIATESTLFIRQNQLVYYFTGTYTTLYERNRGSGECAVAGPTPGEGTLVNPSTEGSWIRVLASECIKKLCPVYFHSNGSEYIMALTTGKHEGYVHFGTIRVTTCSIIWSEYIAGEYTLLLLVESGYGNASKRFQVVSYNTASDDLELLYHIPEFIPEARGLEFLMILGTESYTSTAMAPKGIFCNPYNNLIFIWGNFLLQRSGTSWRAATGSTSCSLPRAGRCTSA

SEQ ID NO: 2142 - protein, 332 aa, Homo sapiens
MAAVFLVTLYEYSPLFYIAVVFTCFIVTTGLVLGWFGWDVPVILRNSEETQFSTRVFKKQMRQVKNPFGLEITNPSSASITTGITLTTDCLEDSLLTCYWGCSVQKLYEALQKHVYCFRISTPQALEDALYSEYLYQEQYFIKKDSKEEIYCQLPRDTKIEDFGTVPRSRYPLVALLTLADEDDREIYDIISMVSVIHIPDRTYKLSCRILYQYLLLAQGQFHDLKQLFMSANNNFTPSNNSSSEEKNTDRSLLEKVGLSESEVEPSEENSKDCVVCQNGTVNWVLLPCRHTCLCDGCVKYFQQCPMCRQFVQESFALCSQKEQDKDKPKTL

SEQ ID NO: 2143 - protein, 255 aa, Homo sapiens
MKESSLQNSSCSLGKETKKENMFLQSSMLTCIFLLISGSCELCAEENFSRSYPCDEKKQNDSVIAECSNRRLQEVPQTVGKYVTELDLSDNFITHITNESFQGLQNLTKINLNHNPNVQHQNGNPGIQSNGLNITDGAFLNLKNLRELLLEDNQLPQIPSGLPESLTELSLIQNNIYNITKEGISRLINLKNLYLAWNCYFNKVCEKTNIEDGVFETLTNLELLSLSFNSLSHVPPKLPSSLRKLFLSNTQIKYI

SEQ ID NO: 2144 - protein, 254 aa, Homo sapiens
MDNYADLSDTELTTLLRRYNIPHGPVVGSTRRLYEKKIFEYETQRRRLSPPSSSAASSYSFSDLNSTRGDADMYDLPKKEDALLYQSKGYNDDYYEESYFTTRTYGEPESAGPSRAVRQSVTSFPDADAFHHQVHDDDLLSSSEEECKDRERPMYGRDSAYQSITHYRPVSASRSSLDLSYYPTSSSTSFMSSSSSSSSWLTRRAIRPENRAPGAGLGQDRQVPLWGQLLLFLVFVIVLFFIYHFMQAEEGNPF

SEQ ID NO: 2145 - protein, 255 aa, Homo sapiens
VLCCYCKNEMSGPAQVPMMSPNGSVPPIYVPPGYAPQVIEDNGVRRVVVVPQAPEFHPGSHTVLHRSPHPPLPGFIPVPTMMPPPPRHMYSPVTGAGDMTTQYMPQYQSSQVYGDVDAHSTHGRSNFRDERSSKTYERLQKKLKDRQGTQKDKMSSPPSSPQKCPSPINEHNGLIKGQIAGGINTGSAKIKSGKGKGGTQVDTEIEEKDEETKAFEALLSNIVKPVASDIQARTVVLTWSPPSSLINGETDESSV

SEQ ID NO: 2146 - protein, 650 aa, Homo sapiens
MTPILTVLICLGLSLGPRTHVQAGHLPKPTLWAEPGSVITQGSPVTLRCQGGQETQEYRLYREKKTALWITRIPQELVKKGQFPIPSITWEHAGRYRCYYGSDTAGRSESSDPLELVVTGAYIKPTLSAQPSPVVNSGGNVILQCDSQVAFDGFSLCKEGEDEHPQCLNSQPHARGSSRAIFSVGPVSPSRRWWYRCYAYDSNSPYEWSLPSDLLELLVLGVSKKPSLSVQPGPIVAPEETLTLQCGSDAGYNRFVLYKDGERDFLQLAGAQPQAGLSQANFTLGPVSRSYGGQYRCYGAHNLSSEWSAPSDPLDILIAGQFYDRVSLSVQPGPTVASGENVTLLCQSQGWMQTFLLTKEGAADDPWRLRSTYQSQKYQAEFPMGPVTSAHAGTYRCYGSQSSKPYLLTHPSDPLELVVSGPSGGPSSPTTGPTSTSGPEDQPLTPTGSDPQSGLGRHLGVVIGILVAVILLLLLLLLLFLILRHRRQGKHWTSTQRKADFQHPAGAVGPEPTDRGLQWRSSPAADAQEENLYAAVKHTQPEDGVEMDTRSPHDEDPQAVTYAEVKHSRPRREMASPPSPLSGEFLDTKDRQAEEDRQMDTEAAASEAPQDVTYAQLHSLTLRREATEPPPSQEGPSPAVPSIYATLAIH

SEQ ID NO: 2147 - protein, 551 aa, Homo sapiens
MLPLLLLPLLWGGSLQEKPVYELQVQKSVTVQEGLCVLVPCSFSYPWRSWYSSPPLYVYWFRDGEIPYYAEVVATNNPDRRVKPETQGRFRLLGDVQKKNCSLSIGDARMEDTGSYFFRVERGRDVKYSYQQNKLNLEVTALIEKPDIHFLEPLESGRPTRLSCSLPGSCEAGPPLTFSWTGNALSPLDPETTRSSELTLTPRPEDHGTNLTCQMKRQGAQVTTERTVQLNVSYAPQTITIFRNGIALEILQNTSYLPVLEGQALRLLCDAPSNPPAHLSWFQGSPALNATPISNTGILELRRVRSAEEGGFTCRAQHPLGFLQIFLNLSVYSLPQLLGPSCSWEAEGLHCRCSFRARPAPSLCWRLEEKPLEGNSSQGSFKVNSSSAGPWANSSLILHGGLSSDLKVSCKAWNIYGSQSGSVLLLQGRSNLGTGVVPAALGGAGVMALLCICLCLIFFLIVKARRKQAAGRPEKMDDEDPIMGTITSGSRKKPWPDSPGDQASPPGDAPPLEEQKELHYASLSFSEMKSREPKDQEAPSTTEYSEIKTSK

SEQ ID NO: 2148 - protein, 728 aa, Homo sapiens
MWVTKLLPALLLQHVLLHLLLLPIAIPYAEGQRKRRNTIHEFKKSAKTTLIKIDPALKIKTKKVNTADQCANRCTRNKGLPFTCKAFVFDKARKQCLWFPFNSMSSGVKKEFGHEFDLYENKDYIRNCIIGKGRSYKGTVSITKSGIKCQPWSSMIPHEHSFLPSSYRGKDLQENYCRNPRGEEGGPWCFTSNPEVRYEVCDIPQCSEVECMTCNGESYRGLMDHTESGKICQRWDHQTPHRHKFLPERYPDKGFDDNYCRNPDGQPRPWCYTLDPHTRWEYCAIKTCADNTMNDTDVPLETTECIQGQGEGYRGTVNTIWNGIPCQRWDSQYPHEHDMTPENFKCKDLRENYCRNPDGSESPWCFTTDPNIRVGYCSQIPNCDMSHGQDCYRGNGKNYMGNLSQTRSGLTCSMWDKNMEDLHRHIFWEPDASKLNENYCRNPDDDAHGPWCYTGNPLIPWDYCPISRCEGDTTPTIVNLDHPVISCAKTKQLRVVNGIPTRTNIGWMVSLRYRNKHICGGSLIKESWVLTARQCFPSRDLKDYEAWLGIHDVHGRGDEKCKQVLNVSQLVYGPEGSDLVLMKLARPAVLDDFVSTIDLPNYGCTIPEKTSCSVYGWGYTGLINYDGLLRVAHLYIMGNEKCSQHHRGKVTLNESEICAGAEKIGSGPCEGDYGGPLVCEQHKMRMVLGVIVPGRGCAIPNRPGIFVRVAYYAKWIHKIILTYKVPQS

SEQ ID NO: 2149 - protein, 523 aa, Homo sapiens
MSFHKEDGVNSLCQKALHIVTELCFAGQVEWEKCSGIFPRDRGSQGGSSTDISVSLLAVVVSFCGLALLVVSLFVFWKLCWPCWKSKPVTSNITTLPQSISSAPTEVFETEEKKEIKENEKPAVKAIEPAIKISHTSPDIPAEVQTALKEHLIKHARVQRQITEPTSSTRHSSFRRHLPRQMQVSSVDFSMGTEPVLQRGETTTSIGRIKPELYKQKSVDSEGNQNEDVKICGKLNFTLQYDYENELLVVKIIKALDLPAKDFTGTSDPYVKMYLLPDRKKKFQTRVHRKTLNPLFDETFQFPVAYDQLSNRKLHFSVYDFDRFSRHDMIGEVILDNLFEVSDLSREATVWKDIHCATTESIDLGEIMFSLCYLPTAGRMTLTVIKCRNLKAMDITGSSDPYVKVSLMCEGRRLKKRKTTTKKNTLNPVYNEAIIFDIPPENVDQVSLSIAVMDYDRVGHNEVIGVCRTGLDAEGLGRDHWNEMLAYHRKPITHWHPLLELPGRATSFDSQGSCPSPKPPSTP

SEQ ID NO: 2150 - protein, 513 aa, Homo sapiens
MKMASFLAFLLLNFRVCLLLLQLLMPHSAQFSVLGPSGPILAMVGEDADLPCHLFPTMSAETMELKWVSSSLRQVVNVYADGKEVEDRQSAPYRGRTSILRDGITAGKAALRIHNVTASDSGKYLCYFQDGDFYEKALVELKVAALGSDLHVDVKGYKDGGIHLECRSTGWYPQPQIQWSNNKGENIPTVEAPVVADGVGLYAVAASVIMRGSSGEGVSCTIRSSLLGLEKTASISIADPFFRSAQRWIAALAGTLPVLLLLLGGAGYFLWQQQEEKKTQFRKKKREQELREMAWSTMKQEQSTRVKLLEELRWRSIQYASRGERHSAYNEWKKALFKPADVILDPKTANPILLVSEDQRSVQRAKEPQDLPDNPERFNWHYCVLGCESFISGRHYWEVEVGDRKEWHIGVCSKNVQRKGWVKMTPENGFWTMGLTDGNKYRTLTEPRTNLKLPKPPKKVGVFLDYETGDISFYNAVDGSHIHTFLDVSFSEALYPVFRILTLEPTALTICPA

SEQ ID NO: 2151 - protein, 265 aa, Homo sapiens
MAAAVPKRMRGPAQAKLLPGSAIQALVGLARPLVLALLLVSAALSSVVSRTDSPSPTVLNSHISTPNVNALTHENQTKPSISQISTTLPPTTSTKKSGGASVVPHPSPTPLSQEEADNNEDPSIEEEDLLMLNSSPSTAKDTLDNGDYGEPDYDWTTGPRDDDESDDTLEENRGYMEIEQSVKSFKMPSSNIEEEDSHFFFHLIIFAFCIAVVYITYHNKRKIFLLVQSRKWRDGLCSKTVEYHRLDQNVNEAMPSLKITNDYIF

SEQ ID NO: 2152 - protein, 255 aa, Homo sapiens
MTSSLQRPWRVPWLPWTILLVSTAAASQNQERLCAFKDPYQQDLGIGESRISHENGTILCSKGSTCYGLWEKSKGDINLVKQGKCWSHIGDPQECHYEECVVTTTPPSIQNGTYRFCCCSTDLCNVNFTENFPPPDTTPLSPPHSFNRDETIIIALASVSVLAVLIVALCFGYRMLTGDRKQGLHSMNMMEAAASEPSLDLDNLKLLELIGRGRYGAVYKGSLDERPVAVKVFSFANRQNFINEKNIYRVPLMEH

SEQ ID NO: 2153 - protein, 291 aa, Homo sapiens
MGILSFLPVLATESDWADCKSPQPWGHMLLWTAVLFLAPVAGTPAAPPKAVLKLEPQWINVLQEDSVTLTCRGTHSPESDSIQWFHNGNLIPTHTQPSYRFKANNNDSGEYTCQTGQTSLSDPVHLTVLSEWLVLQTPHLEFQEGETIVLRCHSWKDKPLVKVTFFQNGKSKKFSRSDPNFSIPQANHSHSGDYHCTGNIGYTLYSSKPVTITVQAPSSSPMGIIVAVVTGIAVAAIVAAVVALIYCRKKRISANPTNPDEADKVGAENTITYSLLMHPDALEEPDDQNRI

SEQ ID NO: 2154 - protein, 376 aa, Homo sapiens
MLKKISVGVAGDLNTVTMKLGCVLMAWALYLSLGVLWVAQMLLAASFETLQCEGPVCTEESSCHTEDDLTDAREAGFQVKAYTFSEPFHLIVSYDWLILQGPAKPVFEGDLLVLRCQAWQDWPLTQVTFYRDGSALGPPGPNREFSITVVQKADSGHYHCSGIFQSPGPGIPETASVVAITVQELFPAPILRAVPSAEPQAGSPMTLSCQTKLPLQRSAARLLFSFYKDGRIVQSRGLSSEFQIPTASEDHSGSYWCEAATEDNQVWKQSPQLEIRVQGASSSAAPPTLNPAPQKSAAPGTAPEEAPGPLPPPPTPSSEDPGFSSPLGMPDPHLYHQMGLLLKHMQDVRVLLGHLLMELRELSGHRKPGTTKATAE

SEQ ID NO: 2155 - protein, 836 aa, Homo sapiens
MARLGNCSLTWAALIILLLPGSLEECGHISVSAPIVHLGDPITASCIIKQNCSHLDPEPQILWRLGAELQPGGRQQRLSDGTQESIITLPHLNHTQAFLSCCLNWGNSLQILDQVELRAGYPPAIPHNLSCLMNLTTSSLICQWEPGPETHLPTSFTLKSFKSRGNCQTQGDSILDCVPKDGQSHCCIPRKHLLLYQNMGIWVQAENALGTSMSPQLCLDPMDVVKLEPPMLRTMDPSPEAAPPQAGCLQLCWEPWQPGLHINQKCELRHKPQRGEASWALVGPLPLEALQYELCGLLPATAYTLQIRCIRWPLPGHWSDWSPSLELRTTERAPTVRLDTWWRQRQLDPRTVQLFWKPVPLEEDSGRIQGYVVSWRPSGQAGAILPLCNTTELSCTFHLPSEAQEVALVAYNSAGTSRPTPVVFSESRGPALTRLHAMARDPHSLWVGWEPPNPWPQGYVIEWGLGPPSASNSNKTWRMEQNGRATGFLLKENIRPFQLYEIIVTPLYQDTMGPSQHVYAYSQEMAPSHAPELHLKHIGKTWAQLEWVPEPPELGKSPLTHYTIFWTNAQNQSFSAILNASSRGFVLHGLEPASLYHIHLMAASQAGATNSTVLTLMTLTPEGSELHIILGLFGLLLLLTCLCGTAWLCCSPNRKNPLWPSVPDPAHSSLGSWVPTIMEEDAFQLPGLGTPPITKLTVLEEDEKKPVPWESHNSSETCGLPTLVQTYVLQGDPRAVSTQPQSQSGTSDQVLYGQLLGSPTSPGPGHYLRCDSTQPLLAGLTPSPKSYENLWFQASPLGTLVTPAPSQEDDCVFGPLLNFPLLQGIRVHGMEALGSF

SEQ ID NO: 2156 - protein, 801 aa, Homo sapiens
MEASGKLICRQRQVLFSFLLLGLSLAGAAEPRSYSVVEETEGSSFVTNLAKDLGLEQREFSRRGVRVVSRGNKLHLQLNQETADLLLNEKLDREDLCGHTEPCVLRFQVLLESPFEFFQAELQVIDINDHSPVFLDKQMLVKVSESSPPGTAFPLKNAEDLDIGQNNIENYIISPNSYFRVLTRKRSDGRKYPELVLDKALDREEEAELRLTLTALDGGSPPRSGTAQVYIEVVDVNDNAPEFEQPFYRVQISEDSPISFLVVKVSATDVDTGVNGEISYSLFQASDEISKTFKVDFLTGEIRLKKQLDFEKFQSYEVNIEARDAGGFSGKCTVLIQVIDVNDHAPEVTMSAFTSPIPENAPETVVALFSVSDLDSGENGKISCSIQEDLPFLLKSSVGNFYTLLTETPLDRESRAEYNVTITVTDLGTPRLTTHLNMTVLVSDVNDNAPAFTQTSYTLFVRENNSPALHIGSVSATDRDSGTNAQVTYSLLPPQDPHLPLASLVSINTDNGHLFALRSLDYEALQAFEFRVGASDRGSPALSSEALVRVLVLDANDNSPFVLYPLQNGSAPCTELVPRAAEPGYLVTKVVAVDGDSGQNAWLSYQLLKATEPGLFGVWAHNGEVRTARLLSERDAAKQRLVVLVKDNGEPPCSATATLHLLLVDGFSQPYLPLPEAAPAQGQADSLTVYLVVALASVSSLFLFSVLLFVAVLLCRRSRAASVGRCSVPEGPFPGHLVDVRGTGSLSQNYQYEVCLAGGSGTNEFQFLKPVLPNIQGHSFGPEMEQNSNFRNGFGFSLQLK

SEQ ID NO: 2157 - protein, 795 aa, Homo sapiens
MENGGAGTLQIRQVLLFFVLLGMSQAGSETGNFLVMEELQSGSFVGNLAKTLGLEVSELSSRGARVVSNDNKECLQLDTNTGDLLLREMLDREELCGSNEPCVLYFQVLMKNPTQFLQIELQVRDINDHSPVFLEKEMLLEIPENSPVGAVFLLESAKDLDVGINAVKSYTINPNSHFHVKIRVNPDNRKYPELVLDKALDYEERPELSFILTALDGGSPPRSGTALVRVVVVDINDNSPEFEQAFYEVKILENSILGSLVVTVSAWDLDSGTNSELSYTFSHASEDIRKTFEINQKSGDITLTAPLDFEAIESYSIIIQATDGGGLFGKSTVRIQVMDVNDNAPEITVSSITSPIPENTPETVVMVFRIRDRDSGDNGKMVCSIPEDIPFVLKSSVNNYYTLETERPLDRESRAEYNITITVTDLGTPRLKTEHNITVLVSDVNDNAPAFTQTSYALFVRENNSPALHIGSISATDRDSGTNAQVNYSLLPSQDPHLPLASLVSINADNGHLFALRSLDYEALQGFQFRVGATDHGSPALSSEALVRVLVLDANDNSPFVLYPLQNGSAPCTELVPWAAEPGYLVTKVVAVDGDSGQNAWLSYQLLKATEPGLFGVWAHNGEVRTARLLSERDAAKHRLVVLVKDNGEPPRSATATLHVLLVDGFSQPYLPLPEAAPAQAQADSLTVYLVVALASVSSLFLFSVLLFVAVRLCRRSRAAPVGRCSVPEGPFPGHLVDVSGTGTLSQSYHYEVCVTGGSRSNKFKFLKPIIPNFLPQSTGSEVEENPPFQNNLGF

SEQ ID NO: 2158 - protein, 584 aa, Homo sapiens
MKMASSLAFLLLNFHVSLFLVQLLTPCSAQFSVLGPSGPILAMVGEDADLPCHLFPTMSAETMELRWVSSSLRQVVNVYADGKEVEDRQSAPYRGRTSILRDGITAGKAALRIHNVTASDSGKYLCYFQDGDFYEKALVELKVAALGSDLHIEVKGYEDGGIHLECRSTGWYPQPQIKWSDTKGENIPAVEAPVVADGVGLYAVAASVIMRGSSGGGVSCIIRNSLLGLEKTASISIADPFFRSAQPWIAALAGTLPISLLLLAGASYFLWRQQKEKIALSRETEREREMKEMGYAATEQEISLREKLQEELKWRKIQYMARGEKSLAYHEWKMALFKPADVILDPDTANAILLVSEDQRSVQRAEEPRDLPDNPERFEWRYCVLGCENFTSGRHYWEVEVGDRKEWHIGVCSKNVERKKGWVKMTPENGYWTMGLTDGNKYRALTEPRTNLKLPEPPRKVGIFLDYETGEISFYNATDGSHIYTFPHASFSEPLYPVFRILTLEPTALTICPIPKEVESSPDPDLVPDHSLETPLTPGLANESGEPQAEVTSLLLPAHPGAEVSPSATTNQNHKLQARTEALY

SEQ ID NO: 2159 - protein, 375 aa, Homo sapiens
MSLMVISMACVGFFLLQGAWTHEGGQDKPLLSAWPSAVVPRGGHVTLLCRSRLGFTIFSLYKEDGVPVPELYNKIFWKSILMGPVTPAHAGTYRCRGSHPRSPIEWSAPSNPLVIVVTGLFGKPSLSAQPGPTVRTGENVTLSCSSRSSFDMYHLSREGRAHEPRLPAVPSVNGTFQADFPLGPATHGGTYTCFGSLHDSPYEWSDPSDPLLVSVTGNSSSSSSSPTEPSSKTGIRRHLHILIGTSVAIILFIILFFFLLHCCCSNKKNAAVMDQEPAGDRTVNREDSDDQDPQEVTYAQLDHCVFTQTKITSPSQRPKTPPTDTTMYMELPNAKPRSLSPAHKHHSQALRGSSRETTALSQNRVASSHVPAAGI

SEQ ID NO: 2160 - protein, 649 aa, Homo sapiens
MISAAWSIFLIGTKIGLFLQVAPLSVMAKSCPSVCRCDAGFIYCNDRFLTSIPTGIPEDATTLYLQNNQINNAGIPSDLKNLLKVERIYLYHNSLDEFPTNLPKYVKELHLQENNIRTITYDSLSKIPYLEELHLDDNSVSAVSIEEGAFRDSNYLRLLFLSRNHLSTIPWGLPRTIEELRLDDNRISTISSPSLQGLTSLKRLVLDGNLLNNHGLGDKVFFNLVNLTELSLVRNSLTAAPVNLPGTNLRKLYLQDNHINRVPPNAFSYLRQLYRLDMSNNNLSNLPQGIFDDLDNITQLILRNNPWYCGCKMKWVRDWLQSLPVKVNVRGLMCQAPEKVRGMAIKDLNAELFDCKDSGIVSTIQITTAIPNTVYPAQGQWPAPVTKQPDIKNPKLTKDHQTTGSPSRKTITITVKSVTSDTIHISWKLALPMTALRLSWLKLGHSPAFGSITETIVTGERSEYLVTALEPDSPYKVCMVPMETSNLYLFDETPVCIETETAPLRMYNPTTTLNREQEKEPYKNPNLPLAAIIGGAVALVTIALLALVCWYVHRNGSLFSRNCAYSKGRRRKDDYAEAGTKKDNSILEIRETSFQMLPISNEPISKEEFVIHTIFPPNGMNLYKNNHSESSSNRSYRDSGIPDSDHSHS

SEQ ID NO: 2161 - protein, 674 aa, Homo sapiens
MVVAHPTATATTTPTATVTATVVMTTATMDLRDWLFLCYGLIAFLTEVIDSTTCPSVCRCDNGFIYCNDRGLTSIPADIPDDATTLYLQNNQINNAGIPQDLKTKVNVQVIYLYENDLDEFPINLPRSLRELHLQDNNVRTIARDSLARIPLLEKLHLDDNSVSTVSIEEDAFADSKQLKLLFLSRNHLSSIPSGLPHTLEELRLDDNRISTIPLHAFKGLNSLRRLVLDGNLLANQRIADDTFSRLQNLTELSLVRNSLAAPPLNLPSAHLQKLYLQDNAISHIPYNTLAKMRELERLDLSNNNLTTLPRGLFDDLGNLAQLLLRNNPWFCGCNLMWLRDWVKARAAVVNVRGLMCQGPEKVRGMAIKDITSEMDECFETGPQGGVANAAAKTTASNHASATTPQGSLFTLKAKRPGLRLPDSNIDYPMATGDGAKTLAIHVKALTADSIRITWKATLPASSFRLSWLRLGHSPAVGSITETLVQGDKTEYLLTALEPKSTYIICMVTMETSNAYVADETPVCAKAETADSYGPTTTLNQEQNAGPMASLPLAGIIGGAVALVFLFLVLGAICWYVHQAGELLTRERAYNRGSRKKDDYMESGTKKDNSILEIRGPGLQMLPINPYRAKEEYVVHTIFPSNGSSLCKATHTIGYGTTRGYRDGGIPDIDYSYT

SEQ ID NO: 2162 - protein, 531 aa, Homo sapiens
MRRYKLFLMFCMAGLCLISFLHFFKTLSYVTFPRELASLSPNLVSSFFWNNAPVTPQASPEPGGPDLLRTPLYSHSPLLQPLPPSKAAEELHRVDLVLPEDTTEYFVRTKAGGVCFKPGTKMLERPPPGRPEEKPEGANGSSARRPPRYLLSARERTGGRGARRKWVECVCLPGWHGPSCGVPTVVQYSNLPTKERLVPREVPRRVINAINVNHEFDLLDVRFHELGDVVDAFVVCESNFTAYGEPRPLKFREMLTNGTFEYIRHKVLYVFLDHFPPGGRQDGWIADDYLRTFLTQDGVSRLRNLRPDDVFIIDDADEIPARDGVLFLKLYDGWTEPFAFHMRKSLYGFFWKQPGTLEVVSGCTVDMLQAVYGLDGIRLRRRQYYTMPNFRQYENRTGHILVQWSLGSPLHFAGWHCSWCFTPEGIYFKLVSAQNGDFPRWGDYEDKRDLNYIRGLIRTGGWFDGTQQEYPPADPSEHMYAPKYLLKNYDRFHYLLDNPYQEPRSTAAGGWRHRGPEGRPPARGKLDEAEV

SEQ ID NO: 2163 - protein, 255 aa, Homo sapiens
IRTPPLSFCASKRVLEQRVLRRLGGRAERWPRERSRRAARVSQAPPLGLQIPEPRGAGRHVPFFPLHPSPQPAPHPPAPPFSLLSGPTVTTLGSYEASEGCERKKGQRWGSLERRGMQAMEGEVLLPALYEEEEEEEEEEEEVEEEEEQVQKGGSVGSLSVNKHRGLSLTETELEELRAQVLQLVAELEETRELAGQHEDDSLELQGLLEDERLASAQQAEVFTKQIQQLQGELRSLREEISLLEHEKESELKEI

SEQ ID NO: 2164 - protein, 685 aa, Homo sapiens
MAAASRSASGWALLLLVALWQQRAAGSGVFQLQLQEFINERGVLASGRPCEPGCRTFFRVCLKHFQAVVSPGPCTFGTVSTPVLGTNSFAVRDDSSGGGRNPLQLPFNFTWPGTFSLIIEAWHAPGDDLRPEALPPDALISKIAIQGSLAVGQNWLLDEQTSTLTRLRYSYRVICSDNYYGDNCSRLCKKRNDHFGHYVCQPDGNLSCLPGWTGEYCQQPICLSGCHEQNGYCSKPAECLCRPGWQGRLCNECIPHNGCRHGTCSTPWQCTCDEGWGGLFCDQDLNYCTHHSPCKNGATCSNSGQRSYTCTCRPGYTGVDCELELSECDSNPCRNGGSCKDQEDGYHCLCPPGYYGLHCEHSTLSCADSPCFNGGSCRERNQGANYACECPPNFTGSNCEKKVDRCTSNPCANGGQCLNRGPSRMCRCRPGFTGTYCELHVSDCARNPCAHGGTCHDLENGLMCTCPAGFSGRRCEVRTSIDACASSPCFNRATCYTDLSTDTFVCNCPYGFVGSRCEFPVGLPPSFPWVAVSLGVGLAVLLVLLGMVAVAVRQLRLRRPDDGSREAMNNLSDFQKDNLIPAAQLKNTNQKKELEVDCGLDKSNCGKQQNHTLDYNLAPGPLGRGTMPGKFPHSDKSLGEKAPLRLHSEKPECRISAICSPRDSMYQSVCLISEERNECVIATEV

SEQ ID NO: 2165 - protein, 463 aa, Homo sapiens
MLLLLLPLLWGRERAEGQTSKLLTMQSSVTVQEGLCVHVPCSFSYPSHGWIYPGPVVHGYWFREGANTDQDAPVATNNPARAVWEETRDRFHLLGDPHTKNCTLSIRDARRSDAGRYFFRMEKGSIKWNYKHHRLSVNVTALTHRPNILIPGTLESGCPQNLTCSVPWACEQGTPPMISWIGTSVSPLDPSTTRSSVLTLIPQPQDHGTSLTCQVTFPGASVTTNKTVHLNVSYPPQNLTMTVFQGDGTVSTVLGNGSSLSLPEGQSLRLVCAVDAVDSNPPARLSLSWRGLTLCPSQPSNPGVLELPWVHLRDAAEFTCRAQNPLGSQQVYLNVSLQSKATSGVTQGVVGGAGATALVFLSFCVIFVVVRSCRKKSARPAAGVGDTGIEDANAVRGSASQGPLTEPWAEDSPPDQPPPASARSSVGEGELQYASLSFQMVKPWDSRGQEATDTEYSEIKIHR

SEQ ID NO: 2166 - protein, 676 aa, Homo sapiens
VLIGDPITTCLSPSVYDIICNLGFQLRENCDINSIVTQNGEVCWKTITDCVSYTESEQGLDYWGSVRLLGPVCEAVHSHFLSLTKGQFEIRYAPWFQWTSFPELFPEIFDALESLQSPAISLSLMKLTSCLERALGDVFLLIGKECPFLLRDLLSSEELAQVFSQSVMNVLKVFVGSPCGLNLRNVLWHGFASPEEIPPKYCSMMILLTAGLGQLLKSYLQNTKLTLAHRSFISLTNLEDLIVFPDVTYEVLSVLEEVMMKSAFILKIMLPYWEVALVKFKSHRFADCAILLLTQLETGLRNVFATLNRCPKRLLTAESTALYTTFDQILAKHLNDGKINQLPLFLGEPAMEFLWDFLNHQEGPRIRDHLSHGEINLHEFSKETTNQLLAFSLVLLLRFVDDCLLSVFKEKSAVELLISLAEGYSSRCHPVFQLKKQVLSCEESIRVWALLPFPEELTRQAVRLEDNSETNACHSLITKMTDELYHHMPENRCVLKDLDRLPTETWPQLLRELCSTPVPTLFCPRIVLEVLVVLRSISEQCRRVSSQVTVASELRHRQWVERTLRSRQRQNYLRMWSSIRLLSPVLSLILLLIALELVNIHAVCGKNAHEYQQYLKFVKSILQYTENLVAYTSYEKNKWNETINLTHTALLKMWTFSEKKQMLIHLAKKSTSKVLL

SEQ ID NO: 2167 - protein, 255 aa, Homo sapiens
LDMSCPLLQQNKQVVPVSSHRNPRLDLAAYDQEGRRFDNFSSLSIQWESTRPVLASIEPELPMQLVSQDDESGQKKLHGLQAILVHEASGTTAITATATGYQESHLSSARTKQPHDPLVPLSASIELILVEDVRVSPEEVTIYNHPGIQAELRIREGSGYFFLNTSTADVVKVAYQEARGVAMVHPLLPGSSTIMIHDLCLVFPAPAKAVVYVSDIQELYIRVVDKVEIGKTVKAYVRVLDLHKKPFLAKYFPFM

SEQ ID NO: 2168 - protein, 638 aa, Homo sapiens
MGRYSAVGSVTERIFTLYYDHLGFLHKLTLGRFEASGPPTAFGNSRNLFGQPPDMGFETALAPQHTSLDEIIFFAYVPENEPQETIYSKKFGNIHYGKVIHSGKTGRAYIRKVLQHTTPKGFLSSVIAEMKEPFGLEEVNESSCLSSSLLINKAGNVYKLTLDSQVVQALFEDTDIEKTVVLPGYSSFLITSILDNKNALAIATMPESAPNNMTFLKSTWFLYNFGQRNGRTWKIYSKPCNYWFQHDDSPSLNIVKYIDLGNSYVLKAKVIRNAKGFRMLEIPLLTVFVGNPNLLEVTAEVTFDDTDSYVITISAASKVLHQGSTSLAFIMWSASTECFVTTMVPTLKSSCSYLRSMHHIPSKFIPFEDWISGVHKDSQGFNLIKTLPINYRPPSNMGIAIPLTDNFYHADPSKPIPRNMFHMSKKTGKFKQCANVSTREECNCTKDQKFSHAVAFSDCREKVPRFKFPITQYPVSLEIINEDGRVPLQSPYLVTVTEVNMRHNWKLKHTVPENIKRMKQLVEPILGAAVYNPSGLNLSIKGSELFHFRVTVISGVTFCNLIEEFQIYVDEAPLPFPGHTLIAVATAVVLGGLIFIAFMFQLQGIHPWRTFQRWIRRNQEKFSSISLSELIHRSKSEE

SEQ ID NO: 2169 - protein, 790 aa, Homo sapiens
MRSVQIFLSQCRLLLLLVPTMLLKSLGEDVIFHPEGEFDSYEVTIPEKLSFRGEVQGVVSPVSYLLQLKGKKHVLHLWPKRLLLPRHLRVFSFTEHGELLEDHPYIPKDCNYMGSVKESLDSKATISTCMGGLRGVFNIDAKHYQIEPLKASPSFEHVVYLLKKEQFGNQVCGLSDDEIEWQMAPYENKARLRDFPGSYKHPKYLELILLFDQSRYRFVNNNLSQVIHDAILLTGIMDTYFQDVRMRIHLKALEVWTDFNKIRVGYPELAEVLGRFVIYKKSVLNARLSSDWAHLYLQRKYNDALAWSFGKVCSLEYAGSVSTLLDTNILAPATWSAHELGHAVGMSHDEQYCQCRGRLNCIMGSGRTGFSNCSYISFFKHISSGATCLNNIPGLGYVLKRCGNKIVEDNEECDCGSTEECQKDRCCQSNCKLQPGANCSIGLCCHDCRFRPSGYVCRQEGNECDLAEYCDGNSSSCPNDVYKQDGTPCKYEGRCFRKGCRSRYMQCQSIFGPDAMEAPSECYDAVNLIGDQFGNCEITGIRNFKKCESANSICGRLQCINVETIPDLPEHTTIISTHLQAENLMCWGTGYHLSMKPMGIPDLGMINDGTSCGEGRVCFKKNCVNSSVLQFDCLPEKCNTRGVCNNRKNCHCMYGWAPPFCEEVGYGGSIDSGPPGLLRGAIPSSIWVVSIIMFRLILLILSVVFVFFRQVIGNHLKPKQEKMPLSKAKTEQEESKTKTVQEESKTKTGQEESEAKTGQEESKAKTGQEESKANIESKRPKAKSVKKQKK

SEQ ID NO: 2170 - protein, 233 aa, Homo sapiens
MDNQGVIYSDLNLPPNPKRQQRKPKGNKNSILATEQEITYAELNLQKASQDFQGNDKTYHCKDLPSAPEKLIVGILGIICLILMASVVTIVVIPSTLIQRHNNSSLNTRTQKARHCGHCPEEWITYSNSCYYIGKERRTWEESLLACTSKNSSLLSIDNEEEMKFLSIISPSSWIGVFRNSSHHPWVTMNGLAFKHEIKDSDNAELNCAVLQVNRLKSAQCGSSIIYHCKHKL

SEQ ID NO: 2171 - protein, 533 aa, Homo sapiens
MWLGRRALCALVLLLACASLGLLYASTRDAPGLRLPLAPWAPPQSPRRPELPDLAPEPRYAHIPVRIKEQVVGLLAWNNCSCESSGGGLPLPFQKQVRAIDLTKAFDPAELRAASATREQEFQAFLSRSQSPADQLLIAPANSPLQYPLQGVEVQPLRSILVPGLSLQAASGQEVYQVNLTASLGTWDVAGEVTGVTLTGEGQADLTLVSPGLDQLNRQLQLVTYSSRSYQTNTADTVRFSTEGHEAAFTIRIRHPPNPRLYPPGSLPQGAQYNISALVTIATKTFLRYDRLRALITSIRRFYPTVTVVIADDSDKPERVSGPYVEHYLMPFGKGWFAGRNLAVSQVTTKYVLWVDDDFVFTARTRLERLVDVLERTPLDLVGGAVREISGFATTYRQLLSVEPGAPGLGNCLRQRRGFHHELVGFPGCVVTDGVVNFFLARTDKVREVGFDPRLSRVAHLEFFLDGLGSLRVGSCSDVVVDHASKLKLPWTSRDAGAETYARYRYPGSLDESQMAKHRLLFFKHRLQCMTSQ

SEQ ID NO: 2172 - protein, 448 aa, Homo sapiens
MAHVGDCTQTPWLPVLVVSLMCSARAEYSNCGENEYYNQTTGLCQECPPCGPGEEPYLSCGYGTKDEDYGCVPCPAEKFSKGGYQICRRHKDCEGFFRATVLTPGDMENDAECGPCLPGYYMLENRPRNIYGMVCYSCLLAPPNTKECVGATSGASANFPGTSGSSTLSPFQHAHKELSGQGHLATALIIAMSTIFIMAIAIVLIIMFYILKTKPSAPACCTSHPGKSVEAQVSKDEEKKEAPDNVVMFSEKDEFEKLTATPAKPTKSENDASSENEQLLSRSVDSDEEPAPDKQGSPELCLLSLVHLAREKSATSNKSAGIQSRRKKILDVYANVCGVVEGLSPTELPFDCLEKTSRMLSSTYNSEKAVVKTWRHLAESFGLKRDEIGGMTDGMQLFDRISTAGYSIPELLTKLVQIERLDAVESLCADILEWAGVVPPASQPHAAS

SEQ ID NO: 2173 - protein, 359 aa, Homo sapiens
MAEAITYADLRFVKAPLKKSISSRLGQDPGADDDGEITYENVQVPAVLGVPSSLASSVLGDKAAVKSEQPTASWRAVTSPAVGRILPCRTTCLRYLLLGLLLTCLLLGVTAICLGVRYLQVSQQLQQTNRVLEVTNSSLRQQLRLKITQLGQSAEDLQGSRRELAQSQEALQVEQRAHQAAEGQLQACQADRQKTKETLQSEEQQRRALEQKLSNMENRLKPFFTCGSADTCCPSGWIMHQKSCFYISLTSKNWQESQKQCETLSSKLATFSEIYPQSHSYYFLNSLLPNGGSGNSYWTGLSSNKDWKLTDDTQRTRTYAQSSKCNKVHKTWSWWTLESESCRSSLPYICEMTAFRFPD

SEQ ID NO: 2174 - protein, 556 aa, Homo sapiens
MELCGLGLPRPPMLLALLLATLLAAMLALLTQVALVVQVAEAARAPSVSAKPGPALWPLPLLVKMTPNLLHLAPENFYISHSPNSTAGPSCTLLEEAFRRYHGYIFGFYKWHHEPAEFQAKTQVQQLLVSITLQSECDAFPNISSDESYTLLVKEPVAVLKANRVWGALRGLETFSQLVYQDSYGTFTINESTIIDSPRFSHRGILIDTSRHYLPVKIILKTLDAMAFNKFNVLHWHIVDDQSFPYQSITFPELSNKGSYSLSHVYTPNDVRMVIEYARLRGIRVLPEFDTPGHTLSWGKGQKDLLTPCYSRQNKLDSFGPINPTLNTTYSFLTTFFKEISEVFPDQFIHLGGDEVEFKCWESNPKIQDFMRQKGFGTDFKKLESFYIQKVLDIIATINKGSIVWQEVFDDKAKLAPGTIVEVWKDSAYPEELSRVTASGFPVILSAPWYLDLISYGQDWRKYYKVEPLDFGGTQKQKQLFIGGEACLWGEYVDATNLTPRLWPRASAVGERLWSSKDVRDMDDAYDRLTRHRCRMVERGIAAQPLYAGYCNHENM

SEQ ID NO: 2175 - protein, 755 aa, Homo sapiens
MNVIYFPLHIFVVYSRAYTSLVLVGCTNLCAVLFARCLDDHLVSLRMSGSRKEFDVKQILKIRWRWFGHQASSPNSTVDSQQGEFWNRGQTGANGGRKFLDPCSLQLPLASIGYRRSSQLDFQNSPSWPMASTSEVPAFEFTAEDCGGAHWLDRPEVDDGTSEEENESDSSSCRTSNSSQTLSSCHTMEPCTSDEFFQALNHAEQTFKKMENYLRHKQLCDVILVAGDRRIPAHRLVLSSVSDYFAAMFTNDVREARQEEIKMEGVEPNSLWSLIQYAYTGRLELKEDNIECLLSTACLLQLSQVVEACCKFLMKQLHPSNCLGIRSFADAQGCTDLHKVAHNYTMEHFMEVIRNQEFVLLPASEIAKLLASDDMNIPNEETILNALLTWVRHDLEQRRKDLSKLLAYIRLPLLAPQFLADMENNVLFRDDIECQKLIMEAMKYHLLPERRPMLQSPRTKPRKSTVGTLFAVGGMDSTKGATSIEKYDLRTNMWTPVANMNGRRLQFGVAVLDDKLYVVGGRDGLKTLNTVECYNPKTKTWSVMPPMSTHRHGLGVAVLEGPMYAVGGHDGWSYLNTVERWDPQARQWNFVATMSTPRSTVGVAVLSGKLYAVGGRDGSSCLKSVECFDPHTNKWTLCAQMSKRRGGVGVTTWNGLLYAIGGHDAPASNLTSRLSDCVERYDPKTDMWTAVASMSISRDAVGVCLLGDKLYAVGGYDGQAYLNTVEAYDPQTNEWTQVAPLCLGRAGACVVTVKL

SEQ ID NO: 2176 - protein, 146 aa, Homo sapiens
MATAEASGSDGKGQEVETSVTYYRLEEVAKRNSLKELWLVIHGRVYDVTRFLNEHPGGEEVLLEQAGVDASESFEDVGHSSDAREMLKQYYIGDIHPSDLKPESGSKDPSKNDTCKSCWAYWILPIIGAVLLGFLYRYYTSESKSS

SEQ ID NO: 2177 - protein, 207 aa, Homo sapiens
MQPSGWAAAREAAGRDMLAADLRCSLFASALQSYKRDSVLRPFPASYARGDCKDFEALTSLFGEGTYLTSDLSLALIYSPHGHGWQHSLLGPILSCVAVCEVIDHPDVKCQTKKKDSKEIDRRRARIKHSEGGDIPPKYFVVTNNQLLRVKYLLVYSQKPPKRASSQLSWFSSHWFTVMISLYLLLLLIVSVINSSAFQHFWNRAKR

SEQ ID NO: 2178 - protein, 785 aa, Homo sapiens
MKLGKVEFCHFLQLIALFLCFSGMSQAELSRSRSKPYFQSGRSRTKRSWVWNQFFVLEEYMGSDPLYVGKLHSDVDKGDGSIKYILSGEGASSIFIIDENTGDIHATKRLDREEQAYYTLRAQALDRLTNKPVEPESEFVIKIQDINDNEPKFLDGPYTAGVPEMSPVGTSVVQVTATDADDPTYGNSARVVYSILQGQPYFSVEPKTGVIKTALPNMDREAKDQYLLVIQAKDMVGQNGGLSGTTSVTVTLTDVNDNPPRFPRRSYQYNVPESLPVASVVARIKAADADIGANAEMEYKIVDGDGLGIFKISVDKETQEGIITIQKELDFEAKTSYTLRIEAANKDADPRFLSLGPFSDTTTVKIIVEDVDEPPVFSSPLYPMEVSEATQVGNIIGTVAAHDPDSSNSPVRYSIDRNTDLERYFNIDANSGVITTAKSLDRETNAIHNITVLAMESQNPSQVGRGYVAITILDINDNAPEFAMDYETTVCENAQPGQVIQKISAVDKDEPSNGHQFYFSLTTDATNNHNFSLKDNKDNTASILTRRNGFRRQEQSVYYLPIFIVDSGSPSLSSTNTLTIRVCDCDADGVAQTCNAEAYVLPAGLSTGALIAILACVLTLLVLILLIVTMRRRKKEPLIFDEERDIRENIVRYDDEGGGEEDTEAFDMAALRNLNVIRDTKTRRDVTPEIQFLSRPAFKSIPDNVIFREFIWERLKEADVDPGAPPYDSLQTYAFEGNGSVAESLSSLDSISSNSDQNYDYLSDWGPRFKRLADMYGTGQESLYS

SEQ ID NO: 2179 - protein, 364 aa, Homo sapiens
MPLLLLLPLLWAGALAMDPNFWLQVQESVTVQEGLCVLVPCTFFHPIPYYDKNSPVHGYWFREGAIISRDSPVATNKLDQEVQEETQGRFRLLGDPSRNNCSLSIVDARRRDNGSYFFRMERGSTKYSYKSPQLSVHVTDLTHRPKILIPGTLEPGHSKNLTCSVSWACEQGTPPIFSWLSAAPTSLGPRTTHSSVLIITPRPQDHGTNLTCQVKFAGAGVTTERTIQLNVTYVPQNPTTGIFPGDGSGKQETRAGVVHGAIGGAGVTALLALCLCLIFFIVKTHRRKAARTAVGRNDTHPTTGSASPKHQKKSKLHGPTETSSCSGAAPTVEMDEELHYASLNFHGMNPSKDTSTEYSEVRTQ

SEQ ID NO: 2180 - protein, 479 aa, Homo sapiens
MSCVLGGVIPLGLLFLVCGSQGYLLPNVTLLEELLSKYQHNESHSRVRRAIPREDKEEILMLHNKLRGQVQPQASNMEYMTWDDELEKSAAAWASQCIWEHGPTSLLVSIGQNLGAHWGRYRSPGFHVQSWYDEVKDYTYPYPSECNPWCPERCSGPMCTHYTQIVWATTNKIGCAVNTCRKMTVWGEVWENAVYFVCNYSPKGNWIGEAPYKNGRPCSECPPSYGGSCRNNLCYREETYTPKPETDEMNEVETAPIPEENHVWLQPRVMRPTKPKKTSAVNYMTQVVRCDTKMKDRCKGSTCNRYQCPAGCLNHKAKIFGTLFYESSSSICRAAIHYGILDDKGGLVDITRNGKVPFFVKSERHGVQSLSKYKPSSSFMVSKVKVQDLDCYTTVAQLCPFEKPATHCPRIHCPAHCKDEPSYWAPVFGTNIYADTSSICKTAVHAGVISNESGGDVDVMPVDKKKTYVGSLRNGVQSE

SEQ ID NO: 2181 - protein, 511 aa, Homo sapiens
MLVDGPSERPALCFLLLAVAMSFFGSALSIDETRAHLLLKEKMMRLGGRLVLNTKEELANERLMTLKIAEMKEAMRTLIFPPSMHFFQAKHLIERSQVFNILRMMPKGAALHLHDIGIVTMDWLVRNVTYRPHCHICFTPRGIMQFRFAHPTPRPSEKCSKWILLEDYRKRVQNVTEFDDSLLRNFTLVTQHPEVIYTNQNVVWSKFETIFFTISGLIHYAPVFRDYVFRSMQEFYEDNVLYMEIRARLLPVYELSGEHHDEEWSVKTYQEVAQKFVETHPEFIGIKIIYSDHRSKDVAVIAESIRMAMGLRIKFPTVVAGFDLVGHEDTGHSLHDYKEALMIPAKDGVKLPYFFHAGETDWQGTSIDRNILDALMLNTTRIGHGFALSKHPAVRTYSWKKDIPIEVCPISNQVLKLVSDLRNHPVATLMATGHPMVISSDDPAMFGAKGLSYDFYEVFMGIGGMKADLRTLKQLAMNSIKYSTLLESEKNTFMEIWKKRWDKFIADVATK

SEQ ID NO: 2182 - protein, 113 aa, Homo sapiens
MGGLEPCSRLLLLPLLLAVSGLRPVQAQAQSDCSCSTVSPGVLAGIVMGDLVLTVLIALAVYFLGRLVPRGRGAAEAATRKQRITETESPYQELQGQRSDVYSDLNTQRPYYK

SEQ ID NO: 2183 - protein, 255 aa, Homo sapiens
MEQTDCKPYQPLPKVKHEMDLAYTSSSDESEDGRKPRQSYNSRETLHEYNQELRMNYNSQSRKRKEVEKSTQEMEFCETSHTLCSGYQTDMHSVSRHGYQLEMGSDVDTETEGAASPDHALRMWIRGMKSEHSSCLSSRANSALSLTDTDHERKSDGENGFKFSPVCCDMEAQAGSTQGKYVQSSPHNQFTFRPLPPPPPPPHACTCARKPPPAADSLQRRSMTTRSQPSPAAPAPPTSTQDSVHLHNSWVLNSN

SEQ ID NO: 2184 - protein, 897 aa, Homo sapiens
MVLAQGLLSMALLALCWERSLAGAEETIPLQTLRCYNDYTSHITCRWADTQDAQRLVNVTLIRRVNEDLLEPVSCDLSDDMPWSACPHPRCVPRRCVIPCQSFVVTDVDYFSFQPDRPLGTRLTVTLTQHVQPPEPRDLQISTDQDHFLLTWSVALGSPQSHWLSPGDLEFEVVYKRLQDSWEDAAILLSNTSQATLGPEHLMPSSTYVARVRTRLAPGSRLSGRPSKWSPEVCWDSQPGDEAQPQNLECFFDGAAVLSCSWEVRKEVASSVSFGLFYKPSPDAGEEECSPVLREGLGSLHTRHHCQIPVPDPATHGQYIVSVQPRRAEKHIKSSVNIQMAPPSLNVTKDGDSYSLRWETMKMRYEHIDHTFEIQYRKDTATWKDSKTETLQNAHSMALPALEPSTRYWARVRVRTSRTGYNGIWSEWSEARSWDTESVLPMWVLALIVIFLTIAVLLALRFCGIYGYRLRRKWEEKIPNPSKSHLFQNGSAELWPPGSMSAFTSGSPPHQGPWGSRFPELEGVFPVGFGDSEVSPLTIEDPKHVCDPPSGPDTTPAASDLPTEQPPSPQPGPPAASHTPEKQASSFDFNGPYLGPPHSRSLPDILGQPEPPQEGGSQKSPPPGSLEYLCLPAGGQVQLVPLAQAMGPGQAVEVERRPSQGAAGSPSLESGGGPAPPALGPRVGGQDQKDSPVAIPMSSGDTEDPGVASGYVSSADLVFTPNSGASSVSLVPSLGLPSDQTPSLCPGLASGPPGAPGPVKSGFEGYVELPPIEGRSPRSPRNNPVPPEAKSPVLNPGERPADVSPTSPQPEGLLVLQQVGDYCFLPGLGPGPLSLRSKPSSPGPGPEIKNLDQAFQVKKPPGQAVPQVPVIQLFKALKQQDYLSLPPWEVNKPGEVC

SEQ ID NO: 2185 - protein, 508 aa, Homo sapiens
MEPAGPAPGRLGPLLCLLLAASCAWSGVAGEEELQVIQPDKSVLVAAGETATLRCTATSLIPVGPIQWFRGAGPGRELIYNQKEGHFPRVTTVSDLTKRNNMDFSIRIGNITPADAGTYYCVKFRKGSPDDVEFKSGAGTELSVRAKPSAPVVSGPAARATPQHTVSFTCESHGFSPRDITLKWFKNGNELSDFQTNVDPVGESVSYSIHSTAKVVLTREDVHSQVICEVAHVTLQGDPLRGTANLSETIRVPPTLEVTQQPVRAENQVNVTCQVRKFYPQRLQLTWLENGNVSRTETASTVTENKDGTYNWMSWLLVNVSAHRDDVKLTCQVEHDGQPAVSKSHDLKVSAHPKEQGSNTAAENTGSNERNIYIVVGVVCTLLVALLMAALYLVRIRQKKAQGSTSSTRLHEPEKNAREITQVQSLDTNDITYADLNLPKGKKPAPQAAEPNNHTEYASIQTSPQPASEDTLTYADLDMVHLNRTPKQPAPKPEPSFSEYASVQVPRK

SEQ ID NO: 2186 - protein, 656 aa, Homo sapiens
MVAPKSHTDDWAPGPFSSKPQRSQLQIFSSVLQTSLLFLLMGLRASGKDSAPTVVSGILGGSVTLPLNISVDTEIENVIWIGPKNALAFARPKENVTIMVKSYLGRLDITKWSYSLCISNLTLNDAGSYKAQINQRNFEVTTEEEFTLFVYEQLQEPQVTMKSVKVSENFSCNITLMCSVKGAEKSVLYSWTPREPHASESNGGSILTVSRTPCDPDLPYICTAQNPVSQRSSLPVHVGQFCTDPGASRGGTTGETVVGVLGEPVTLPLALPACRDTEKVVWLFNTSIISKEREEAATADPLIKSRDPYKNRVWVSSQDCSLKISQLKIEDAGPYHAYVCSEASSVTSMTHVTLLIYRRLRKPKITWSLRHSEDGICRISLTCSVEDGGNTVMYTWTPLQKEAVVSQGESHLNVSWRSSENHPNLTCTASNPVSRSSHQFLSENICSGPERNTKLWIGLFLMVCLLCVGIFSWCIWKRKGRCSVPAFCSSQAEAPADTPEPTAGHTLYSVLSQGYEKLDTPLRPARQQPTPTSDSSSDSNLTTEEDEDRPEVHKPISGRYEVFDQVTQEGAGHDPAPEGQADYDPVTPYVTEVESVVGENTVYAQVFNLQGKTPVSQKEESSATIYCSIRKPQVVVPPPQQNDLEIPESPTYENFT

SEQ ID NO: 2187 - protein, 255 aa, Homo sapiens
MMDIYVCLKRPSWMVDNKRMRTASNFQWLLSTFILLYLMNQVNSQKKGAPHDLKCVTNNLQVWNCSWKAPSGTGRGTDYEVCIENRSRSCYQLEKTSIKIPALSHGDYEITINSLHDFGSSTSKFTLNEQNVSLIPDTPEILNLSADFSTSTLYLKWNDRGSVFPHRSNVIWEIKVLRKESMELVKLVTHNTTLNGKDTLHHWSWASDMPLECAIHFVEIRCYIDNLHFSGLEEWSDWSPVKNISWIPDSQTKVF

SEQ ID NO: 2188 - protein, 476 aa, Homo sapiens
ASCLGRLSWYDPDFQARLTRSNSKCQGQLEVYLKDGWHMVCSQSWGRSSKQWEDPSQASKVCQRLNCGVPLSLGPFLVTYTPQSSIICYGQLGSFSNCSHSRNDMCHSLGLTCLEPQKTTPPTTRPPPTTTPEPTAPPRLQLVAQSGGQHCAGVVEFYSGSLGGTISYEAQDKTQDLENFLCNNLQCGSFLKHLPETEAGRAQDPGEPREHQPLPIQWKIQNSSCTSLEHCFRKIKPQKSGRVLALLCSGFQPKVQSRLVGGSSICEGTVEVRQGAQWAALCDSSSARSSLRWEEVCREQQCGSVNSYRVLDAGDPTSRGLFCPHQKLSQCHELWERNSYCKKVFVTCQDPNPAGLAAGTVASIILALVLLVVLLVVCGPLAYKKLVKKFRQKKQRQWIGPTGMNQNMSFHRNHTATVRSHAENPTASHVDNEYSQPPRNSHLSAYPALEGALHRSSMQPDNSSDSDYDLHGAQRL

SEQ ID NO: 2189 - protein, 731 aa, Homo sapiens
EGGDQSEEEPRERSQAGGMGTLWSQESTPEERLPVEGSRPWAVARRVLTAILILGLLLCFSVLLFYNFQNCGPRPCETSVCLDLRDHYLASGNTSVAPCTDFFSFACGRAKETNNSFQELATKNKNRLRRILEVQNSWHPGSGEEKAFQFYNSCMDTLAIEAAGTGPLRQVIEELGGWRISGKWTSLNFNRTLRLLMSQYGHFPFFRAYLGPHPASPHTPVIQIDQPEFDVPLKQDQEQKIYAQIFREYLTYLNQLGTLLGGDPSKVQEHSSLSISITSRLFQFLRPLEQRRAQGKLFQMVTIDQLKEMAPAIDWLSCLQATFTPMSLSPSQSLVVHDVEYLKNMSQLVEEMLLKQRDFLQSHMILGLVVTLSPALDSQFQEARRKLSQKLRELTEQPPMPARPRWMKCVEETGTFFEPTLAALFVREAFGPSTRSAAMKLFTAIRDALITRLRNLPWMNEETQNMAQDKVAQLQVEMGASEWALKPELARQEYNDIQLGSSFLQSVLSCVRSLRARIVQSFLQPHPQHRWKVSPWDVNAYYSVSDHVVVFPAGLLQPPFFHPGYPRAVNFGAAGSIMAHELLHIFYQLLLPGGCLACDNHALQEAHLCLKRHYAAFPLPSRTSFNDSLTFLENAADVGGLAIALQAYSKRLLRHHGETVLPSLDLSPQQIFFRSYAQVMCRKPSPQDSHDTHSPPHLRVHGPLSSTPAFARYFRCARGALLNPSSRCQLW

SEQ ID NO: 2190 - protein, 255 aa, Homo sapiens
LSAEHTSSLVPSLHITTLGQEQAILSGAVPASPSTGTADFPSILTFLQPTENHASPSPVPEMPTLPAEGSDGSPPATRDLLLSSKVPNLLSTSWTFPRWKKDSVTAILGKNEEANVTIPLQAFPRKEVLSLHTVNGFVSDFSTGSVSSPIITAPRTNPLPSGPPLPSILSIQATQTVFPSLGFSSTKPEAYAAAVDHSGLPASASKQVRASPSSMDVYDSLTIGDMKKPATTDVFWSSLSAETGSLSTESIISGL

SEQ ID NO: 2191 - protein, 891 aa, Homo sapiens
AAAGPGAARAKETAFVEVVLFESSPSGDYTTYTTGLTGRFSRAGATLSAEGEIVQMHPLGLCNNNDEEDLYEYGWVGVVKLEQPELDPKPCLTVLGKAKRAVQRGATAVIFDVSENPEAIDQLNQGSEDPLKRPVVYVKGADAIKLMNIVNKQKVARARIQHRPPRQPTEYFDMGIFLAFFVVVSLVCLILLVKIKLKQRRSQNSMNRLAVQALEKMETRKFNSKSKGRREGSCGALDTLSSSSTSDCAICLEKYIDGEELRVIPCTHRFHRKCVDPWLLQHHTCPHCRHNIIEQKGNPSAVCVETSNLSRGRQQRVTLPVHYPGRVHRTNAIPAYPTRTSMDSHGNPVTLLTMDRHGEQSLYSPQTPAYIRSYPPLHLDHSLAAHRCGLEHRAYSPAHPFRRPKLSGRSFSKAACFSQYETMYQHYYFQGLSYPEQEGQSPPSLAPRGPARAFPPSGSGSLLFPTVVHVAPPSHLESGSTSSFSCYHGHRSVCSGYLADCPGSDSSSSSSSGQCHCSSSDSVVDCTEVSNQGVYGSCSTFRSSLSSDYDPFIYRSRSPCRASEAGGSGSSGRGPALCFEGSPPPEELPAVHSHGAGRGEPWPGPASPSGDQVSTCSLEMNYSSNSSLEHRGPNSSTSEVGLEASPGAAPDLRRTWKGGHELPSCACCCEPQPSPAGPSAGAAGSSTLFLGPHLYEGSGPAGGEPQSGSSQGLYGLHPDHLPRTDGVKYEGLPCCFYEEKQVARGGGGGSGCYTEDYSVSVQYTLTEEPPPGCYPGARDLSQRIPIIPEDVDCDLGLPSDCQGTHSLGSWGGTRGPDTPRPHRGLGATREEERALCCQARALLRPGCPPEEAGAVRANFPSALQDTQESSTTATEAAGPRSHSADSSSPGA

SEQ ID NO: 2192 - protein, 441 aa, Homo sapiens
MGGPRAWALLCLGLLLPGGGAAWSIGAAPFSGRRNWCSYVVTRTISCHVQNGTYLQRVLQNCPWPMSCPGSSYRTVVRPTYKVMYKIVTAREWRCCPGHSGVSCEEASSASLEPMWSGSTMRRMALRPTAFSGCLNCSKVSELTERLKVLEAKMTMLTVIEQPVPPTPATPEDPAPLWGPPPAQGSPGDGGLQDQVGAWGLPGPTGPKGDAGSRGPMGMRGPPGPQGPPGSPGRAGAVGTPGERGPPGPPGPPGPPGPPAPVGPPHARISQHGDPLLSNTFTETNNHWPQGPTGPPGPPGPMGPPGPPGPTGVPGSPGHIGPPGPTGPKGISGHPGEKGERGLRGEPGPQGSAGQRGEPGPKGDPGEKSHWGEGLHQLREALKILAERVLILETMIGLYEPELGSGAGPAGTGTPSLLRGKRGGHATNYRIVAPRSRDERG

SEQ ID NO: 2193 - protein, 195 aa, Homo sapiens
MTDSVIYSMLELPTATQAQNDYGPQQKSSSSRPSCSCLVAIALGLLTAVLLSVLLYQWILCQGSNYSTCASCPSCPDRWMKYGNHCYYFSVEEKDWNSSLEFCLARDSHLLVITDNQEMSLLQVFLSEAFCWIGLRNNSGWRWEDGSPLNFSRISSNSFVQTCGAINKNGLQASSCEVPLHWVCKKCPFADQALF

SEQ ID NO: 2194 - protein, 255 aa, Homo sapiens
MRANDALQVLGLLFSLARGSEVGNSQAVCPGTLNGLSVTGDAENQYQTLYKLYERCEVVMGNLEIVLTGHNADLSFLQWIREVTGYVLVAMNEFSTLPLPNLRVVRGTQVYDGKFAIFVMLNYNTNSSHALRQLRLTQLTEILSGGVYIEKNDKLCHMDTIDWRDIVRDRDAEIVVKDNGRSCPPCHEVCKGRCWGPGSEDCQTLTKTICAPQCNGHCFGPNPNQCCHDECAGGCSGPQDTDCFACRHFNDSGAC

SEQ ID NO: 2195 - protein, 442 aa, Homo sapiens
MLPLLLPLLWAGALAQERRFQLEGPESLTVQEGLCVLVPCRLPTTLPASYYGYGYWFLEGADVPVATNDPDEEVQEETRGRFHLLWDPRRKNCSLSIRDARRRDNAAYFFRLKSKWMKYGYTSSKLSVRVMALTHRPNISIPGTLESGHPSNLTCSVPWVCEQGTPPIFSWMSAAPTSLGPRTTQSSVLTITPRPQDHSTNLTCQVTFPGAGVTMERTIQLNVSYAPQKVAISIFQGNSAAFKILQNTSSLPVLEGQALRLLCDADGNPPAHLSWFQGFPALNATPISNTGVLELPQVGSAEEGDFTCRAQHPLGSLQISLSLFVHWKPEGRAGGVLGAVWGASITTLVFLCVCFIFRVKTRRKKAAQPVQNTDDVNPVMVSGSRGHQHQFQTGIVSDHPAEAGPISEDEQELHYAVLHFHKVQPQEPKVTDTEYSEIKIHK

SEQ ID NO: 2196 - protein, 255 aa, Homo sapiens
EEQLPPGFPSIDMGPQLKVVEKARTATMLCAAGGNPDPEISWFKDFLPVDPATSNGRIKQLRSGALQIESSEESDQGKYECVATNSAGTRYSAPANLYVRVRRVAPRFSIPPSSQEVMPGGSVNLTCVAVGAPMPYVKWMMGAEELTKEDEMPVGRNVLELSNVVRSANYTCVAISSLGMIEATAQVTVKALPKPPIDLVVTETTATSVTLTWDSGNSEPVTYYGIQYRAAGTEGPFQEVDGVATTRYSIGGLSP

SEQ ID NO: 2197 - protein, 219 aa, Homo sapiens
MAGLSRGSARALLAALLASTLLALLVSPARGRGGRDHGDWDEASRLPPLPPREDAARVARFVTHVSDWGALATISTLEAVRGRPFADVLSLSDGPPGAGSGVPYFYLSPLQLSVSNLQENPYATLTMTLAQTNFCKKHGFDPQSPLCVHIMLSGTVTKVNETEMDIAKHSLFIRHPEMKTWPSSHNWFFAKLNITNIWVLDYFGGPKIVTPEEYYNVTV

SEQ ID NO: 2198 - protein, 703 aa, Homo sapiens
EIEQERVKSAGAWIIHPYSDFRFYWDLIMLLLMVGNLIVLPVGITFFKEENSPPWIVFNVLSDTFFLLDLVLNFRTGIVVEEGAEILLAPRAIRTRYLRTWFLVDLISSIPVDYIFLVVELEPRLDAEVYKTARALRIVRFTKILSLLRLLRLSRLIRYIHQWEEIFHMTYDLASAVVRIFNLIGMMLLLCHWDGCLQFLVPMLQDFPPDCWVSINHMVNHSWGRQYSHALFKAMSHMLCIGYGQQAPVGMPDVWLTMLSMIVGATCYAMFIGHATALIQSLDSSRRQYQEKYKQVEQYMSFHKLPADTRQRIHEYYEHRYQGKMFDEESILGELSEPLREEIINFTCRGLVAHMPLFAHADPSFVTAVLTKLRFEVFQPGDLVVREGSVGRKMYFIQHGLLSVLARGARDTRLTDGSYFGEICLLTRGRRTASVRADTYCRLYSLSVDHFNAVLEEFPMMRRAFETVAMDRLLRIGKKNSILQRKRSEPSPGSSGGIMEQHLVQHDRDMARGVRGRAPSTGAQLSGKPVLWEPLVHAPLQAAAVTSNVAIALTHQRGPLPLSPDSPATLLARSAWRSAGSPASPLVPVRAGPWASTSRLPAPPARTLHASLSRAGRSQVSLLGPPPGGGGRRLGPRGRPLSASQPSLPQRATGDGSPGRKGSGSERLPPSGLLAKPPRTAQPPRPPVPEPATPRGLQLSANM

SEQ ID NO: 2199 - protein, 255 aa, Homo sapiens
MALLIHLKTVSELRGRGDRIAKVTFRGQSFYSRVLENCEDVADFDETFRWPVASSIDRNEMLEIQVFNYSKVFSNKLIGTFRMVLQKVVEESHVEVTDTLIDDNNAIIKTSLCVEVRYQATDGTVGSWDDGDFLGDESLQEEEKDSQETDGLLPGSRPSSRPPGEKSFRRAGRSVFSAMKLGKNRSHKEEPQRPDEPAVLEMEDLDHLAIRLGDGLDPDSVSLASVTALTTNVSNKRSKPDIKMEPSAGRPMDYQ

SEQ ID NO: 2200 - protein, 255 aa, Homo sapiens
AAGSSGWAWVPNHCRSPGQAVCNFVCDCRDCSDEAQCGYHGASPTLGAPFACDFEQDPCGWRDISTSGYSWLRDRAGAALEGPGPHSDHTLGTDLGWYMAVGTHRGKEASTAALRSPTLREAASSCKLRLWYHAASGDVAELRVELTHGAETLTLWQSTGPWGPGWQELAVTTGRIRGDFRVTFSATRNATHRGAVALDDLEFWDCGLPTPQANCPPGHHHCQNKVCVEPQQLCDGEDNCGDLSDENPLTCGRHI

SEQ ID NO: 2201 - protein, 623 aa, Homo sapiens
MRVALGMLWLLALAWPPQARGFCPSQCSCSLHIMGDGSKARTVVCNDPDMTLPPASIPPDTSRLRLERTAIRRVPGEAFRPLGRLEQLWLPYNALSELNALMLRGLRRLRELRLPGNRLAAFPWAALRDAPKLRLLDLQANRLSAVPAEAARFLENLTFLDLSSNQLMRLPQELIVSWAHLETGIFPPGHHPRRVLGLQDNPWACDCRLYDLVHLLDGWAPNLAFIETELRCASPRSLAGVAFSQLELRKCQGPELHPGVASIRSLLGGTALLRCGATGVPGPEMSWRRANGRPLNGTVHQEVSSDGTSWTLLGLPAVSHLDSGDYICQAKNFLGASETVISLIVTEPPTSTEHSGSPGALWARTGGGGEAAAYNNKLVARHVPQIPKPAVLATGPSVPSTKEELTLEHFQMDALGELSDGRAGPSEARMVRSVKVVGDTYHSVSLVWKAPQAKNTTAFSVLYAVFGQHSMRRVIVQPGKTRVTITGLLPKTKYVACVCVQGLVPRKEQCVIFSTNEVVDAENTQQLINVVVISVAIVIALPLTLLVCCSALQKRCRKCFNKDSTEATVTYVNLERLGYSEDGLEELSRHSVSEADRLLSARSSVDFQAFGVKGGRRINEYFC

SEQ ID NO: 2202 - protein, 621 aa, Homo sapiens
WGYPVALLLLVATLGLGRWLQPDPGLPGLRHSYDCGIKGMQLLVFPRPGQTLRFKVVDEFGNRFDVNNCSICYHWVTSRPQEPAVFSADYRGCHVLEKDGRFHLRVFMEAVLPNGRVDVAQDATLICPKPDPSRTLDSQLAPPAMFSVSIPQTLSFLPTSGHTSQGSGHAFPSPLDPGHSSVHPTPALPSPGPGPTLATLAQPHWGTLEHWDVNKRDYIGTHLSQEQCQVASGHLPCIVRRTSKEACQQAGCCYDNTREVPCYYGNTATVQCFRDGYFVLVVSQEMALTHRITLANIHLAYAPTSCSPTQHTEAFVVFYFPLTHCGTTMQVAGDQLIYENWLVSGIHIQKGPQGSITRDSTFQLHVRCVFNASDFLPIQASIFPPPSPAPMTQPGPLRLELRIAKDETFSSYYGEDDYPIVRLLREPVHVEVRLLQRTDPNLVLLLHQCWGAPSANPFQQPQWPILSDGCPFKGDSYRTQMVALDGATPFQSHYQRFTVATFALLDSGSQRALRGLVYLFCSTSACHTSGLETCSTACSTGTTRQRRSSGHRNDTARPQDIVSSPGPVGFEDSYGQEPTLGPTDSNGNSSLRPLLWAVLLLPAVALVLGFGVFVGLSQTWA

SEQ ID NO: 2203 - protein, 336 aa, Homo sapiens
MDYPTLLLALLHVYRALCEEVLWHTSVPFAENMSLECVYPSMGILTQVEWFKIGTQQDSIAIFSPTHGMVIRKPYAERVYFLNSTMASNNMTLFFRNASEDDVGYYSCSLYTYPQGTWQKVIQVVQSDSFEAAVPSNSHIVSEPGKNVTLTCQPQMTWPVQAVRWEKIQPRQIDLLTYCNLVHGRNFTSKFPRQIVSNCSHGRWSVIVIPDVTVSDSGLYRCYLQASAGENETFVMRLTVAEGKTDNQYTLFVAGGTVLLLLFVISITTIIVIFLNRRRRRERRDLFTESWDTQKAPNNYRSPISTSQPTNQSMDDTREDIYVNYPTFSRRPKTRV

SEQ ID NO: 2204 - protein, 255 aa, Homo sapiens
MAGIFYFALFSCLFGICDAVTGSRVYPANEVTLLDSRSVQGELGWIASPLEGGWEEVSIMDEKNTPIRTYQVCNVMEPSQNNWLRTDWITREGAQRVYIEIKFTLRDCNSLPGVMGTCKETFNLYYYESDNDKERFIRENQFVKIDTIAADESFTQVDIGDRIMKLNTEIRDVGPLSKKGFYLAFQDVGACIALVSVRVFYKKCPLTVRNLAQFPDTITGADTSSLVEVRGSCVNNSEEKDVPKMYCGADGEWLV

SEQ ID NO: 2205 - protein, 143 aa, Homo sapiens
AQSFGLLDPKLCYLLDGILFIYGVILTALFLRVKFSRSADAPAYQQGQNQLYNELNLGRREEYDVLDKRRGRDPEMGGKPRRKNPQEGLYNELQKDKMAEAYSEIGMKGERRRGKGHDGLYQGLSTATKDTYDALHMQALPPR

SEQ ID NO: 2206 - protein, 255 aa, Homo sapiens
MEPSEVPSQISKDNFLEVPNLSDSLCEDEEVTFQPGFSPQPSRRGSDSSEDIYLDTPSSGTRRVSFADSFGFNLVSVKEFDCWELPSASTTFDLGTDIFHTEEYVLAPLFDLPSSKEDLMQQLQIQKAILESTESLLGSTSIKGIIRVLNVSFEKLVYVRMSLDDWQTHYDILAEYVPNSCDGETDQFSFKIVLVPPYQKDGSKVEFCIRYETSVGTFWSNNNGTNYTFICQKKEQEPEPVKPWKEVPNRQIKGC

SEQ ID NO: 2207 - protein, 428 aa, Homo sapiens
MARSLCPGAWLRKPYYLQARFSYVRMKYLFFSWLVVFVGSWIIYVQYSTYTELCRGKDCKKIICDKYKTGVIDGPACNSLCVTETLYFGKCLSTKPNNQMYLGIWDNLPGVVKCQMEQALHLDFGTELEPRKEIVLFDKPTRGTTVQKFKEMVYSLFKAKLGDQGNLSELVNLILTVADGDKDGQVSLGEAKSAWALLQLNEFLLMVILQDKEHTPKLMGFCGDLYVMESVEYTSLYGISLPWVIELFIPSGFRRSMDQLFTPSWPRKAKIAIGLLEFVEDVFHGPYGNFLMCDTSAKNLGYNDKYDLKMVDMRKIVPETNLKELIKDRHCESDLDCVYGTDCRTSCDQSTMKCTSEVIQPNLAKACQLLKDYLLRGAPSEIREELEKQLYSCIALKVTANQMEMEHSLILNNLKTLLWKKISYTNDS

SEQ ID NO: 2208 - protein, 432 aa, Homo sapiens
MTELQQDVEDTKPAKVLGKRESKLGSAHSEAENGVEEKKKACRSPTAQSPTPSVEADSPDQKKIISLWSKSSFDGASLASDKNDCKTESKNDPKTERKKSSSSSQYKANMHFHKLFLSVPTEEPLKQSFTCALQKEILYQGKLFVSENWICFHSKVFGKDTKISIPAFSVTLIKKTKTALLVPNALIIATVTDRYIFVSLLSRDSTYKLLKSVCGHLENTSVGNSPNPSSAENSFRADRPSSLPLDFNDEFSDLDGVVQQRRQDMEGYSSSGSQTPESENSRDFHATESQTVLNVSKGEAKPTRADAHVNRVPEGKAKSLPVQGLSETVGILHKVKSQKCPMLHHILIFYAIVVCALIISTFYMRYRINTLEEQLGLLTSIVDTHNTEQAAPSGLRSQVQFNVEVLCQELTANIVKLEKIQNNLQKLLENGD

SEQ ID NO: 2209 - protein, 399 aa, Homo sapiens
MGILLGLLLLGHLTVDTYGRPILEVPESVTGPWKGDVNLPCTYDPLQGYTQVLVKWLVQRGSDPVTIFLRDSSGDHIQQAKYQGRLHVSHKVPGDVSLQLSTLEMDDRSHYTCEVTWQTPDGNQVVRDKITELRVQKLSVSKPTVTTGSGYGFTVPQGMRISLQCQARGSPPISYIWYKQQTNNQEPIKVATLSTLLFKPAVIADSGSYFCTAKGQVGSEQHSDIVKFVVKDSSKLLKTKTEAPTTMTYPLKATSTVKQSWDWTTDMDGYLGETSAGPGKSLPVFAIILIISLCCMVVFTMAYIMLCRKTSQQEHVYEAARAHAREANDSGETMRVAIFASGCSSDEPTSQNLGNNYSDEPCIGQEYQIIAQINGNYARLLDTVPLDYEFLATEGKSVC

SEQ ID NO: 2210 - protein, 150 aa, Homo sapiens
DTVDILVGWHIDHTQKPSLTQQVSEDMEAYAEILYRVMRCVTAANQVFFSEAVLTAANECVGVLLGSLDPSMTIHCDMVITYGLDQLENCQTCGTDYIISVLNLLMLMWALSPTVFALLSKNLMIVHSDLAVHFPTIQYAVLYTLYSHCT

SEQ ID NO: 2211 - protein, 333 aa, Homo sapiens
MLFLQFLLLALLLPGGDNADASQEHVSFHVIQIFSFVNQSWARGQGSGWLDELQTHGWDSESGTIIFLHNWSKGNFSNEELSDLELLFRFYLFGLTREIQDHASQDYSKYPFEVQVKAGCELHSGKSPEGFFQVAFNGLDLLSFQNTTWVPSPGCGSLAQSVCHLLNHQYEGVTETVYNLIRSTCPRFLLGLLDAGKMYVHRQVRPEAWLSSRPSLGSGQLLLVCHASGFYPKPVWVTWMRNEQEQLGTKHGDILPNADGTWYLQVILEVASEEPAGLSCRVRHSSLGGQDIILYWGHHFSMNWIALVVIVPLVILIVLVLWFKKHCSYQDIL

SEQ ID NO: 2212 - protein, 381 aa, Homo sapiens
MENTPPGTVFPLKNTQDLDVAINNIQNYTIYPYSHVHALTQNGSEGRKYPELVLDKALDREEQAEIRDSDMGINEQQPRPAYWQRQHRRDSGTNIQVTYSLLPPRNPHLPLASLVSINTDNGHLFALRSLDYEALQEFEFRVGASDRGSTALSSEALVRVLVLDANDSSLFVLFPLQNGSAPCTELMPRAGRRAGLPGDQERLAVVAVAQGHGARAVRRVGAQCTDRLLSERDTAKHRLMVLVKDNGEPPRSATATLHVLLVDGFSLPYLPFPEAAPAQAQADLLTVYLVVALALVSSFFLFSVLLFVAEEQGGLIGSLLGARGPLSRHLVDVSDTRTLSQRYKYEVFLTRGSGTNEFKFLKSVIPKHPGAVNDGRKSPTL

SEQ ID NO: 2213 - protein, 86 aa, Homo sapiens
MIPAVVLLLLLLVEQAAALGEPQLCYILDAILFLYGIVLTLLYCRLKIQVRKAAITSYEKSDGVYTGLSTRNQETYETLKHEKPPQ

SEQ ID NO: 2214 - protein, 515 aa, Homo sapiens [sequence omitted]

SEQ ID NO: 2215 - protein, 686 aa, Homo sapiens
MLLLPLLLPVLGAGSLNKDPSYSLQVQRQVPVPEGLCVIVSCNLSYPRDGWDESTAAYGYWFKGRTSPKTGAPVATNNQSREVEMSTRDRFQLTGDPGKGSCSLVIRDAQREDEAWYFFRVERGSRVRHSFLSNAFFLKVTALTKKPDVYIPETLEPGQPVTVICVFNWAFKKCPAPSFSWTGAALSPRRTRPSTSHFSVLSFTPSPQDHDTDLTCHVDFSRKGVSAQRTVRLRVAYAPKDLIISISHDNTSALELQGNVIYLEVQKGQFLRLLCAADSQPPATLSWVLQDRVLSSSHPWGPRTLGLELRGVRAGDSGRYTCRAENRLGSQQQALDLSVQYPPENLRVMVSQANRTVLENLGNGTSLPVLEGQSLRLVCVTHSSPPARLSWTRWGQTVGPSQPSDPGVLELPPIQMEHEGEFTCHAQHPLGSQHVSLSLSVHYPPQLLGPSCSWEAEGLHCSCSSQASPAPSLRWWLGEELLEGNSSQGSFEVTPSSAGPWANSSLSLHGGLSSGLRLRCKAWNVHGAQSGSVFQLLPGKLEHGGGLGLGAALGAGVAALLAFCSCLVVFRVKICRKEARKRAAAEQDVPSTLGPISQGHQHECSAGSSQDHPPPGAATYTPGKGEEQELHYASLSFQGLRLWEPADQEAPSTTEYSEIKIHTGQPLRGPGFGLQLEREMSGMVPK

SEQ ID NO: 2216 - protein, 249 aa, Homo sapiens
MAARRSQRRRGRRGEPGTALLVPLALGLGLALACLGLLLAVVSLGSRASLSAQEPAQEELVAEEDQDPSELNPQTEESQDPAPFLNRLVRPRRSAPKGRKTRARRAIAAHYEVHPRPGQDGAQAGVDGTVSGWEEARINSSSPLRYNRQIGEFIVTRAGLYYLYCQVHFDEGKAVYLKLDLLVDGVLALRCLEEFSATAASSLGPQLRLCQVSGLLALRPGSSLRIRTLPWAHLKAAPFLTYFGLFQVH

SEQ ID NO: 2217 - protein, 739 aa, Homo sapiens
MPGKMVVILGASNILWIMFAASQAFKIETTPESRYLAQIGDSVSLTCSTTGCESPFFSWRTQIDSPLNGKVTNEGTTSTLTMNPVSFGNEHSYLCTATCESRKLEKGIQVEIYSFPKDPEIHLSGPLEAGKPITVKCSVADVYPFDRLEIDLLKGDHLMKSQEFLEDADRKSLETKSLEVTFTPVIEDIGKVLVCRAKLHIDEMDSVPTVRQAVKELQVYISPKNTVISVNPSTKLQEGGSVTMTCSSEGLPAPEIFWSKKLDNGNLQHLSGNATLTLIAMRMEDSGIYVCEGVNLIGKNRKEVELIVQEKPFTVEISPGPRIAAQIGDSVMLTCSVMGCESPSFSWRTQIDSPLSGKVRSEGTNSTLTLSPVSFENEHSYLCTVTCGHKKLEKGIQVELYSFPRDPEIEMSGGLVNGSSVTVSCKVPSVYPLDRLEIELLKGETILENIEFLEDTDMKSLENKSLEMTFIPTIEDTGKALVCQAKLHIDDMEFEPKQRQSTQTLYVNVAPRDTTVLVSPSSILEEGSSVNMTCLSQGFPAPKILWSRQLPNGELQPLSENATLTLISTKMEDSGVYLCEGINQAGRSRKEVELIIQVTPKDIKLTAFPSESVKEGDTVIISCTCGNVPETWIILKKKAETGDTVLKSIDGAYTIRKAQLKDAGVYECESKNKVGSQLRSLTLDVQGRENNKDYFSPELLVLYFASSLIIPAIGMIIYFARKANMKGSYSLVEAQKSKV

SEQ ID NO: 2218 - protein, 364 aa, Homo sapiens
EILQSVPKFCFPFDVERVSQNQVGQHFTFVLTDIESKQRFGFCRLTSGGTICLCILSYLPWFEVYYKLLNTLADYLAKELENDLNETLRSLYNHPVPKANTPVNLSVHSYFIAPDVTGLPTIPESRNLTEYFVAVDVNNMLQLYASMLHERRIVIISSKLSTLTACIHGSAALLYPMYWQHIYIPVLPPHLLDYCCAPMPYLIGIHSSLIERVKNKSLEDVVMLNVDTNTLESPFSDLNNLPSDVVSALKNKLKKQSTATGDGVARAFLRAQAALFGSYRDALRYKPGEPITFCEESFVKHRSSVMKQFLETAINLQLFKQFIDGRLAKLNAGRGFSDVFEEEITSGGFCGGKDKLQYDYPFSQ

SEQ ID NO: 2219 - protein, 858 aa, Homo sapiens
MGDHLDLLLGVVLMAGPVFGIPSCSFDGRIAFYRFCNLTQVPQVLNTTERLLLSFNYIRTVTASSFPFLEQLQLLELGSQYTPLTIDKEAFRNLPNLRILDLGSSKIYFLHPDAFQGLFHLFELRLYFCGLSDAVLKDGYFRNLKALTRLDLSKNQIRSLYLHPSFGKLNSLKSIDFSSNQIFLVCEHELEPLQGKTLSFFSLAANSLYSRVSVDWGKCMNPFRNMVLEILDVSGNGWTVDITGNFSNAISKSQAFSLILAHHIMGAGFGFHNIKDPDQNTFAGLARSSVRHLDLSHGFVFSLNSRVFETLKDLKVLNLAYNKINKIADEAFYGLDNLQVLNLSYNLLGELYSSNFYGLPKVAYIDLQKNHIAIIQDQTFKFLEKLQTLDLRDNALTTIHFIPSIPDIFLSGNKLVTLPKINLTANLIHLSENRLENLDILYFLLRVPHLQILILNQNRFSSCSGDQTPSENPSLEQLFLGENMLQLAWETELCWDVFEGLSHLQVLYLNHNYLNSLPPGVFSHLTALRGLSLNSNRLTVLSHNDLPANLEILDISRNQLLAPNPDVFVSLSVLDITHNKFICECELSTFINWLNHTNVTIAGPPADIYCVYPDSFSGVSLFSLSTEGCDEEEVLKSLKFSLFIVCTVTLTLFLMTILTVTKFRGFCFICYKTAQRLVFKDHPQGTEPDMYKYDAYLCFSSKDFTWVQNALLKHLDTQYSDQNRFNLCFEERDFVPGENRIANIQDAIWNSRKIVCLVSRHFLRDGWCLEAFSYAQGRCLSDLNSALIMVVVGSLSQYQLMKHQSIRGFVQKQQYLRWPEDLQDVGWFLHKLSQQILKKEKEKKKDNNIPLQTVATIS

SEQ ID NO: 2220 - protein, 725 aa, Homo sapiens
MDDSDTPTYYLQIEPQDGCHPGDSVERSVTCLPSASDENENQLDGDGHEHLTSSDSAMGKPQVSEQDSLNNNESCTLSCEVAAGENLQNTLCEASRDEQAFLGKDKKIPGKRSPRSKKGTAKKIPPGLFSGDIAPLMQEKVLSAVTYAVDDEEAAEVNANEQPEAPKLVLQSLFSLIRGEVEQLDSRALPLCLHQIAESYFQEEDYEKAMKFIQLERLYHEQLLANLSAIQEQWETKWKTVQPHTVTALRNSEKGFNGEDFERLTKICATHQDPLLSKHKIAAVEKSQERKCSTQLLVSEDPKEGGATTKESESKTCLGTESSKESQHTVEPLGSSPCCHQMDVQTDSPSLSVTAGKDHMEELLCSAEATLALHTQSSETAGSPSGPDSSEDACEDDSRLQLAQTEACQDVARIEGIAEDPKVFLSSKSKTEPLISPGCDRIPPALISEGKYSQAQRKELRLPLRDASEALPTDQLENNELNELQQPDLTDSDGKSPQAQADSDGSENVLCGNNQISDLGILLPEVCMAPEEKGDKDDQLNKETEDYLNSLLEGCLKDTEDSLSYEDNQDDDSDLLQDLSPEEASYSLQENLPSDESCLSLDDLAKRIEIAEVVPTEGLVSILKKRNDTVGDHPAQMQHKPSKRRVRFQEIDDSLDQDEVGGGSCILLVLLCIATVFLSVGGTALYCTFGDMESPVCTDFADNMDFYYTKLLQGVAELKHWIYLS

SEQ ID NO: 2221 - protein, 255 aa, Homo sapiens
MRRLLEPCWWILFLKITSSVLHYVVCFPALTEGYVGALHENRHGSAVQIRRRKASGDPYWAYSGAYGPEHWVTSSVSCGGRHQSPIDILDQYARVGEEYQELQLDGFDNESSNKTWMKNTGKTVAILLKDDYFVSGAGLPGRFKAEKVEFHWGHSNGSAGSEHSINGRRFPVEMQIFFYNPDDFDSFQTAISENRIIGAMAIFFQVSPRDNSALDPIIHGLKGVVHHEKETFLDPFVLRDLLPASLGSYYRYTGS

SEQ ID NO: 2222 - protein, 538 aa, Homo sapiens
LPAMLLLWVSVVAALALAVLAPGAGEQRRRAAKAPNVVLVVSDSFDGRLTFHPGSQVVKLPFINFMKTRGTSFLNAYTNSPICCPSRAAMWSGLFTHLTESWNNFKGLDPNYTTWMDVMERHGYRTQKFGKLDYTSGHHSISNRVEAWTRDVAFLLRQEGRPMVNLIRNRTKVRVMERDWQNTDKAVNWLRKEAINYTEPFVIYLGLNLPHPYPSPSSGENFGSSTFHTSLYWLEKVSHDAIKIPKWSPLSEMHPVDYYSSYTKNCTGRFTKKEIKNIRAFYYAMCAETDAMLGEIILALHQLDLLQKTIVIYSSDHGELAMEHRQFYKMSMYEASAHVPLLMMGPGIKAGLQVSNVVSLVDIYPTMLDIAGIPLPQNLSGYSLLPLSSETFKNEHKVKNLHPPWILSEFHGCNVNASTYMLRTNHWKYIAYSDGASILPQLFDLSSDPDELTNVAVKFPEITYSLDQKLHSIINYPKVSASVHQYNKEQFIKWKQSIGQNYSNVIANLRWHQDWQKEPRKYENAIDQWLKTHMNPRA

SEQ ID NO: 2223 - protein, 904 aa, Homo sapiens
MRQTLPCIYFWGGLLPFGMLCASSTTKCTVSHEVADCSHLKLTQVPDDLPTNITVLNLTHNQLRRLPAANFTRYSQLTSLDVGFNTISKLEPELCQKLPMLKVLNLQHNELSQLSDKTFAFCTNLTELHLMSNSIQKIKNNPFVKQKNLITLDLSHNGLSSTKLGTQVQLENLQELLLSNNKIQALKSEELDIFANSSLKKLELSSNQIKEFSPGCFHAIGRLFGLFLNNVQLGPSLTEKLCLELANTSIRNLSLSNSQLSTTSNTTFLGLKWTNLTMLDLSYNNLNVVGNDSFAWLPQLEYFFLEYNNIQHLFSHSLHGLFNVRYLNLKRSFTKQSISLASLPKIDDFSFQWLKCLEHLNMEDNDIPGIKSNMFTGLINLKYLSLSNSFTSLRTLTNETFVSLAHSPLHILNLTKNKISKIESDAFSWLGHLEVLDLGLNEIGQELTGQEWRGLENIFEIYLSYNKYLQLTRNSFALVPSLQRLMLRRVALKNVDSSPSPFQPLRNLTILDLSNNNIANINDDMLEGLEKLEILDLQHNNLARLWKHANPGGPIYFLKGLSHLHILNLESNGFDEIPVEVFKDLFELKIIDLGLNNLNTLPASVFNNQVSLKSLNLQKNLITSVEKKVFGPAFRNLTELDMRFNPFDCTCESIAWFVNWINETHTNIPELSSHYLCNTPPHYHGFPVRLFDTSSCKDSAPFELFFMINTSILLIFIFIVLLIHFEGWRISFYWNVSVHRVLGFKEIDRQTEQFEYAAYIIHAYKDKDWVWEHFSSMEKEDQSLKFCLEERDFEAGVFELEAIVNSIKRSRKIIFVITHHLLKDPLCKRFKVHHAVQQAIEQNLDSIILVFLEEIPDYKLNHALCLRRGMFKSHCILNWPVQKERIGAFRHKLQVALGSKNSVH

SEQ ID NO: 2224 - protein, 883 aa, Homo sapiens
MLQLWKVVRPARQLELHRLILLLIAFSLGSMGFLAYYVSTSPKAKEPLPLPLGDCSSGGAAGPGPARPPVPPRPPRPPETARTEPVVLVFVESAYSQLGQEIVAILESSRFRYSTELAPGRGDMPTLTDNTHGRYVLVIYENLLKYVNLDAWSRELLDRYCVEYGVGIIGFFRAHEHSLLSAQLKGFPLFLHSNLGLRDYQVNPSAPLLHLTRPSRLEPGPLPGDDWTIFQSNHSTYEPVLLASLRPAEPAVPGPVLRRARLPTVVQDLGLHDGIQRVLFGHGLSFWLHKLIFVDAVAYLTGKRLCLDLDRYILVDIDDIFVGKEGTRMKVADVEALLTTQNKLRTLVPNFTFNLGFSGKFYHTGTEEEDAGDDMLLKHRKEFWWFPHMWSHMQPHLFHNRSVLADQMRLNKQFALEHGIPTDLGYAVAPHHSGVYPIHTQLYEAWKSVWGIQVTSTEEYPHLRPARYRRGFIHNGIMVLPRQTCGLFTHTIFYNEYPGGSRELDRSIRGGELFLTVLLNPISIFMTHLSNYGNDRLGLYTFESLVRFLQCWTRLRLQTLPPVPLAQKYFELFPQERSPLWQNPCDDKRHKDIWSKEKTCDRLPKFLIVGPQKTGTTAIHFFLSLHPAVTSSFPSPSTFEEIQFFNSPNYHKGIDWYMDFFPVPSNASTDFLFEKSATYFDSEVVPRRGAALLPRAKIITVLTNPADRAYSWYQHQRAHGDPVALNYTFYQVISASSQTPLALRSLQNRCLVPGYYSTHLQRWLTYYPSGQLLIVDGQELRTNPAASMESIQKFLGITPFLNYTRTLRFDDDKGFWCQGLEGGKTRCLGRSKGRRYPDMDTESRLFLTDFFRNHNLELSKLLSRLGQPVPSWLREELQHSSLG

SEQ ID NO: 2225 - protein, 146 aa, Homo sapiens
ATGTYYCSVHWPHSTVRGSGTFILVRDAGYREPPQSPQKLLLFGFTGLLSVLSVVGTALLLWNKKRMRGPGKDPTRKCPDPRSASSPKQHPSESVYTALQRRETEVYACIENEDGSSPTAKQSPLSQERPHRFEDDGELNLVYENL

SEQ ID NO: 2226 - protein, 299 aa, Homo sapiens
MWLPWALLLLWVPGCFALSKCRTVAGPVGGSLSVQCPYEKEHRTLNKYWCRPPQIFLCDKIVETKGSAGKRNGRVSIRDSPANLSFTVTLENLTEEDAGTYWCGVDTPWLRDFHDPVVEVEVSVFPASTSMTPASITAAKTSTITTAFPPVSSTTLFAVGATHSASIQEETEEVVNSQLPLLLSLLALLLLLLVGASLLAWRMFQKWIKAGDHSELSQNPKQAATQSELHYANLELLMWPLQEKPAPPREVEVEYSTVASPREELHYASVVFDSNTNRIAAQRPREEEPDSDYSVIRKT

SEQ ID NO: 2227 - protein, 664 aa, Homo sapiens
MGVRHPPCSHRLLAVCALVSLATAALLGHILLHDFLLVPRELSGSSPVLEETHPAHQQGASRPGPRDAQAHPGRPRAVPTQCDVPPNSRFDCAPDKAITQEQCEARGCCYIPAKQGLQGAQMGQPWCFFPPSYPSYKLENLSSSEMGYTATLTRTTPTFFPKDILTLRLDVMMETENRLHFTIKDPANRRYEVPLETPHVHSRAPSPLYSVEFSEEPFGVIVRRQLDGRVLLNTTVAPLFFADQFLQLSTSLPSQYITGLAEHLSPLMLSTSWTRITLWNRDLAPTPGANLYGSHPFYLALEDGGSAHGVFLLNSNAMDVVLQPSPALSWRSTGGILDVYIFLGPEPKSVVQQYLDVVGYPFMPPYWGLGFHLCRWGYSSTAITRQVVENMTRAHFPLDVQWNDLDYMDSRRDFTFNKDGFRDFPAMVQELHQGGRRYMMIVDPAISSSGPAGSYRPYDEGLRRGVFITNETGQPLIGKVWPGSTAFPDFTNPTALAWWEDMVAEFHDQVPFDGMWISHLPAALLLQDMNEPSNFIRGSEDGCPNNELENPPYVPGVVGGTLQAATICASSHQFLSTHYNLHNLYGLTEAIASHRLGPLQGLREEEKRRPRPPGARWRPECSPHPLPAPQPEAGALLPTSCLGLGEEGPWMLTGVCISGDLMTP

SEQ ID NO: 2228 - protein, 467 aa, Homo sapiens
MLLLLLLPLLWGRERVEGQKSNRKDYSLTMQSSVTVQEGMCVHVRCSFSYPVDSQTDSDPVHGYWFRAGNDISWKAPVATNNPAWAVQEETRDRFHLLGDPQTKNCTLSIRDARMSDAGRYFFRMEKGNIKWNYKYDQLSVNVTALTHRPNILIPGTLESGCFQNLTCSVPWACEQGTPPMISWMGTSVSPLHPSTTRSSVLTLIPQPQHHGTSLTCQVTLPGAGVTTNRTIQLNVSYPPQNLTVTVFQGEGTASTALGNSSSLSVLEGQSLRLVCAVDSNPPARLSWTWRSLTLYPSQPSNPLVLELQVHLGDEGEFTCRAQNSLGSQHVSLNLSLQQEYTGKMRPVSGVLLGAVGGAGATALVFLSFCVIFIVVRSCRKKSARPAADVGDIGMKDANTIRGSASQGNLTESWADDNPRHHGLAAHSSGEEREIQYAPLSFHKGEPQDLSGQEATNNEYSEIKIPK

SEQ ID NO: 2229 - protein, 632 aa, Homo sapiens [sequence omitted]

SEQ ID NO: 2230 - protein, 789 aa, Homo sapiens
MLMLMLVAAVTMWLRPLVTAQLCRSRTVRTGKVFNLIQDVQGDRLYFHPTTTRLIKHPCEKNIALYLGKQVFFTMDNFETSLLPFTIPTSMQVGVPEVTSAHFAGSLLLLVVDQKVYIYDYENNSWSMSLGIKHPVTHVSGDNCCYTGSLFCVHVSNLVFAYFRGDQISQTYIYYSNTGGFSFWKYHYDRQAEIIGSLGGIFHFFSLSQVAMLVVNQGKGMFKYSDHPLNRSFGLSFDYNGTLDILIAPGQRGILLLWFENSLLFSHNAGQLVDTVRVKKGDQTLFSSIFEAKITIHNIAVTENELAVITREDNLYYGNLGIVPSSIIKVDQYIWSEDVALMFRSPGTLEILTPLRDTAFPAFDFQKCLVNIQALLMDPELHVGKCKIEFLTGEFIYRMYTIDMHSQLELTASLIPQPGTSLIPLVMVSNPHSLGFQATFYENGYTSDGNTKYKLDIFLKQQQHWGRTDSNFTSSLKKATMSTLTVDIANKEISCVDIKPLSTLISVGCDLDKKIVIQNKVSACSMGILDPLTLQDNYSFIIEKEFYDPGFQGQQSSEDLHVFYSYQQLGCPLLVYYDTLWKPVVELWRKDSFQEVIDAEYVLLEVNGQFSYSYSLTAQSAMCTSQPQNWTTMIKEFGGPFFWNRENYVSCHDPNNNAPLRWPDVQYQILGGRTANQIIFGHNGFYVFYISIVDPYYSYCQLETIFSIYVYGAFPVQLVSAGVVILLIISSILGSVWLAYKTPKLLRTARGRRIKKCATQLCRRCKTVCQFRASATARAGTEPPGRHRT

SEQ ID NO: 2231 - protein, 734 aa, Homo sapiens
MLLWLLLLILTPGREQSGVAPKAVLLLNPPWSTAFKGEKVALICSSISHSLAQGDTYWYHDEKLLKIKHDKIQITEPGNYQCKTRGSSLSDAVHVEFSPDWLILQALHPVFEGDNVILRCQGKDNKNTHQKVYYKDGKQLPNSYNLEKITVNSVSRDNSKYHCTAYRKFYILDIEVTSKPLNIQVQELFLHPVLRASSSTPIEGSPMTLTCETQLSPQRPDVQLQFSLFRDSQTLGLGWSRSPRLQIPAMWTEDSGSYWCEVETVTHSIKKRSLRSQIRVQRVPVSNVNLEIRPTGGQLIEGENMVLICSVAQGSGTVTFSWHKEGRVRSLGRKTQRSLLAELHVLTVKESDAGRYYCAADNVHSPILSTWIRVTVRIPVSHPVLTFRAPRAHTVVGDLLELHCESLRGSPPILYRFYHEDVTLGNSSAPSGGGASFNLSLTAEHSGNYSCDADNGLGAQHSHGVSLRVTVPVSRPVLTLRAPGAQAVVGDLLELHCESLRGSFPILYWFYHEDDTLGNISAHSGGGASFNLSLTTEHSGNYSCEADNGLGAQHSKVVTLNVTGTSRNRTGLTAAGITGLVLSILVLAAAAALLHYARARRKPGGLSATGTSSHSPSECQEPSSSRPSRIDPQEPTHSKPLAPMELEPMYSNVNPGDSNPIYSQIWSIQHTKENSANCPMMHQEHEELTVLYSELKKTHPDDSAGEASSRGRAHEEDDEENYENVPRVLLASDH

SEQ ID NO: 2232 - protein, 113 aa, Homo sapiens
LTASLLRAVIASICVVSSMAQKVTQAQTEISVVEKEDVTLDCVYETRDTTYYLFWYKQPPSGELVFLIRRNSFDEQNEISGRYSWNFQKSTSSFNFTITASQVVDSAVYFCAL

SEQ ID NO: 2233 - protein, 164 aa, Homo sapiens
MPDTMLPACFLGLLAFSSACYFQNCPRGGKRAMSDLELRQCLPCGPGGKGRCFGPSICCADELGCFVGTAEALRCQEENYLPSPCQSGQKACGSGGRCAAFGVCCNDESCVTEPECREGFHRRARASDRSNATQLDGPAGALLLRLVQLAGAPEPFEPAQPDAY

SEQ ID NO: 2234 - protein, 141 aa, Homo sapiens
VSLSQGLLLLLLLSMGGAWASREPLRPWCHPINAILAVEKEGCPVCITVNTTICAGYCPTMMRVLQAVLPPLPQVVCTYRDVRFESIRLPGCPRGVDPVVSFPVALSCRCGPCRRSTSDCGGPKDHPLTCDHPQLSGLLFL

SEQ ID NO: 2235 - protein, 179 aa, Homo sapiens
MLLEPGRGCCALAILLAIVDIQSGGCINITSSASQEGTRLNLICTVWHKKEEAEGFVVFLCKDRSGDCSPETSLKQLRLKRDPGIDGVGEISSQLMFTISQVTPLHSGTYQCCARSQKSGIRLQGHFFSILFTETGNYTVTGLKQRQHLEFSHNEGTLSSGFLQEKVWVMLVTSLVALQ

SEQ ID NO: 2236 - protein, 329 aa, Homo sapiens
MVTKAFVLLAIFAEASAKSCAPNKADVILVFCYPKTIITKIPECPYGWEVHQLALGGLCYNGVHEGGYYQFVIPDLSPKNKSYCGTQSEYKPPIYHFYSHIVSNDTTVIVKNQPVNYSFSCTYHSTYLVNQAAFDQRVATVHVKNGSMGTFESQLSLNFYTNAKFSIKKEAPFVLEASEIGSDLFAGVEAKGLSIRFKVVLNSCWATPSADFMYPLQWQLINKGCPTDETVLVHENGRDHRATFQFNAFRFQNIPKLSKVWLHCETFICDSEKLSCPVTCDKRKRLLRDQTGGVLVVELSLRSRGFSSLYSFSDVLHHLIMMLGICAVL

SEQ ID NO: 2237 - protein, 68 aa, Homo sapiens
MAIDCGLTLLAAHCSSGAMSVFTFLPQLGGNRGKDLSSGCGQGSFACILGAPHQRDVGQQFLSAITPG

SEQ ID NO: 2238 - protein, 562 aa, Homo sapiens
MRLRLRLLALLLLLLAPPARAPKPSAQDVSLGVDWLTRYGYLPPPHPAQAQLQSPEKLRDAIKVMQRFAGLPETGRMDPGTVATMRKPRCSLPDVLGVAGLVRRRRRYALSGSVWKKRTLTWRVRSFPQSSQLSQETVRVLMSYALMAWGMESGLTFHEVDSPQGQEPDILIDFARAFHQDSYPFDGLGGTLAHAFFPGEHPISGDTHFDDEETWTFGSKDGEGTDLFAVAVHEFGHALGLGHSSAPNSIMRPFYQGPVGDPDKYRLSQDDRDGLQQLYGKAPQTPYDKPTRKPLAPPPQPPASPTHSPSFPIPDRCEGNFDAIANIRGETFFFKGPWFWRLQPSGQLVSPRPARLHRFWEGLPAQVRVVQAAYARHRDGRILLFSGPQFWVFQDRQLEGGARPLTELGLPPGEEVDAVFSWPQNGKTYLVRGRQYWRYDEAAARPDPGYPRDLSLWEGAPPSPDDVTVSNAGDTYFFKGAHYWRFPKNSIKTEPDAPQPMGPNWLDCPAPSSGPRAPRPPKATPVSETCDCQCELNQAAGRWPAPIPLLLLPLLVGGVASR

SEQ ID NO: 2239 - protein, 289 aa, Homo sapiens
MTPIVTVLICLRLSLGPRTHVQAGTLPKPTLWAEPGSVITQGSPVTLWCQGILETQEYRLYREKKTAPWITRIPQEIVKKGQFPIPSITWEHTGRYRCFYGSHTAGWSEPSDPLELVVTGAYIKPTLSALPSPVVTSGGNVTLHCVSQVAFGSFILCKEGEDEHPQCLNSQPRTHGWSRAIFSVGPVSPSRRWSYRCYAYDSNSPHVWSLPSDLLELLVLGAAETLSPPQNKSDSKAGAANTLSPSQNKTASHPQDYTVENLIRMGIAGLVLVVLGILLFEAQHSQRSL

SEQ ID NO: 2240 - protein, 460 aa, Homo sapiens
MRLLAWLIFLANWGGARAEPGKFWHIADLHLDPDYKVSKDPFQVCPSAGSQPVPDAGPWGDYLCDSPWALINSSIYAMKEIEPEPDFILWTGDDTPHVPDEKLGEAAVLEIVERLTKLIREVFPDTKVYAALGNHDFHPKNQFPAGSNNIYNQIAELWKPWLSNESIALFKKGAFYCEKLPGPSGAGRIVVLNTNLYYTSNALTADMADPGQQFQWLEDVLTDASKAGDMVYIVGHVPPGFFEKTQNKAWFREGFNEKYLKVVRKHHRVIAGQFFGHHHTDSFRMLYDDAGVPISAMFITPGVTPWKTTLPGVVNGANNPAIRVFEYDRATLSLKDMVTYFMNLSQANAQGTPRWELEYQLTEAYGVPDASAHSMHTVLDRIAGDQSTLQRYYVYNSVSYSAGVCDEACSMQHVCAMRQVDIDAYTTCLYASGTTPVPQLPLLLMALLGLCTRAVTCQAH

SEQ ID NO: 2241 - protein, 244 aa, Homo sapiens
MAAAASPAILPRLAILPYLLFDWSGTGRADAHSLWYNFTIIHLPRHGQQWCEVQSQVDQKNFLSYDCGSDKVLSMGHLEEQLYATDAWGKQLEMLREVGQRLRLELADTELEDFTPSGPLTLQVRMSCECEADGYIRGSWQFSFDGRKFLLFDSNNRKWTVVHAGARRMKEKWEKDSGLTTFFKMVSMRDCKSWLRDFLMHRKKRLEPTAPPTMAPGLAQPKAIATTLSPWSFLIILCFILPGI

SEQ ID NO: 2242 - protein, 445 aa, Homo sapiens
MSPPLLLLPLLLLLPLLNVEPAGATLIRIPLRQVHPGRRTLNLLRGWGKPAELPKLGAPSPGDKPASVPLSKFLDAQYFGEIGLGTPPQNFTVAFDTGSSNLWVPSRRCHFFSVPCWFHHRFNPNASSSFKPSGTKFAIQYGTGRVDGILSEDKLTIGGIKGASVIFGEALWESSLVFTVSRPDGILGLGFPILSVEGVRPPLDVLVEQGLLDKPVFSFYFNRDPEVADGGELVLGGSDPAHYIPPLTFVPVTVPAYWQIHMERVKVGSRLTLCAQGCAAILDTGTPVIVGPTEEIRALHAAIGGIPLLAGEYIIRCSEIPKLPAVSLLIGGVWFNLTAQDYVIQFAQGDVRLCLSGFRALDIASPPVPVWILGDVFLGAYVTVFDRGDMKSGARVGLARARPRGADLGRRETAQAQYRGCRPGDAHAHRVAELALLSKNPIFPL

SEQ ID NO: 2243 - protein, 255 aa, Homo sapiens
MPGGPSPRSPAPLLRPLLLLLCALAPGAPGPAPGRATEGRAALDIVHPVRVDAGGSFLSYELWPRALRKRDVSVRRDAPAFYELQYRGRELRFNLTANQHLLAPGFVSETRRRGGLGRAHIRAHTPACHLLGEVQDPELEGGLAAISACDGLKGVFQLSNEDYFIEPLDSAPARPGHAQPHVVYKRQAPERLAQRGDSSAPSTCGVQVYPELESRRERWEQRQQWRRPRLRRLHQRSVSKEKWVETLVVADAKMV

SEQ ID NO: 2244 - protein, 666 aa, Homo sapiens
MTPPPPGRAAPSAPRARVPGPPARLGLPLRLRLLLLLWAAAASAQGHLRSGPRIFAVWKGHVGQDRVDFGQTEPHTVLFHEPGSSSVWVGGRGKVYLFDFPEGKNASVRTVNIGSTKGSCLDKRDCENYITLLERRSEGLLACGTNARHPSCWNLVNGTVVPLGEMRGYAPFSPDENSLVLFEGDEVYSTIRKQEYNGKIPRFRRIRGESELYTSDTVMQNPQFIKATIVHQDQAYDDKIYYFFREDNPDKNPEAPLNVSRVAQLCRGDQGGESSLSVSKWNTFLKAMLVCSDAATNKNFNRLQDVFLLPDPSGQWRDTRVYGVFSNPWNYSAVCVYSLGDIDKVFRTSSLKGYHSSLPNPRPGKCLPDQQPIPTETFQVADRHPEVAQRVEPMGPLKTPLFHSKYHYQKVAVHRMQASHGETFHVLYLTTDRGTIHKVVEPGEQEHSFAFNIMEIQPFRRAAAIQTMSLDAERRKLYVSSQWEVSQVPLDLCEVYGGGCHGCLMSRDPYCGWDQGRCISIYSSERSVLQSINPAEPHKECPNPKPDKAPLQKVSLAPNSRYYLSCPMESRHATYSWRHKENVEQSCEPGHQSPNCILFIENLTAQQYGHYFCEAQEGSYFREAQHWQLLPEDGIMAEHLLGHACALAASLWLGVLPTLTLGLLVH

SEQ ID NO: 2245 - protein, 463 aa, Homo sapiens
MVPALRYLVGACGRARGLFAGGSPGACGFASGRPRPLCGGSRSASTSSFDIVIVGGGIVGLASARALILRHPSLSIGVLEKEKDLAVHQTGHNSGVIHSGIYYKPESLKAKLCVQGAALLYEYCQQKGISYKQCGKLIVAVEQEEIPRLQALYEKGLQNGVPGLRLIQQEDIKKKEPYCRGLMAIDCPHTGIVDYRQVALSFAQDFQEAGGSVLTNFEVKGIEMAKESPSRSIDGMQYPIVIKNTKGEEIRCQYVVTCAGLYSDRISELSGCTPDPRIVPFRGDYLLLKPEKCYLVKGNIYPVPDSRFPFLGVHFTPRMDGSIWLGPNAVLAFKREGYRPFDFSATDVMDIIINSGLIKLASQNFSYGVTEMYKACFLGATVKYLQKFIPEITISDILRGPAGVRAQALDRDGNLVEDFVFDAGVGDIGNRILHVRNAPSPAATSSIAISGMIADEVQQRFEL

SEQ ID NO: 2246 - protein, 400 aa, Homo sapiens
MVRPLNPRPLPPVVLMLLLLLPPSPLPLAAGDPLPTESRLMNSCLQARRKCQADPTCSAAYHHLDSCTSSISTPLPSEEPSVPADCLEAAQQLRNSSLIGCMCHRRMKNQVACLDIYWTVHRARSLGNYELDVSPYEDTVTSKPWKMNLSKLNMLKPDSDLCLKFAMLCTLNDKCDRLRKAYGEACSGPHCQRHVCLRQLLTFFEKAAEPHAQGLLLCPCAPNDRGCGERRRNTIAPNCALPPVAPNCLELRRLCFSDPLCRSRLVDFQTHCHPMDILGTCATEQSRCLRAYLGLIGTAMTPNFVSNVNTSVALSCTCRGSGNLQEECEMLEGFFSHNPCLTEAIAAKMRFHSQLFSQDWPHPTFAVMAHQNENPAVRPQPWVPSLFSCTLPLILLLSLW

SEQ ID NO: 2247 - protein, 131 aa, Homo sapiens
MGLSGLLPILVPFILLGDIQEPGHAEGILGKPCPKIKVECEVEEIDQCTKPRDCPENMKCCPFSRGKKCLDFRKIYAVCHRRLAPAWPPYHTGGTIKKTKICSEFIYGGSQGNNNNFQTEAICLVTCKKYH

SEQ ID NO: 2248 - protein, 269 aa, Homo sapiens
MVRCLGPALLLLLLLGSASSVGGNRCVDAAEACTADARCQRLRSEYVAQCLGRAAQGGCPRARCRRALRRFFARGPPALTHALLFCPCAGPACAERRRQTFVPSCAFSGPGPAPPSCLEPLNFCERSRVCRPRLLAFQVSCTPAPSAPDGCLLDQGARCLRAYAGLVGTAVTPNYVDNVSARVAPWCDCGASGNRREDCEAFRGLFTRNRCLDGAIQAFASGWPPVLLDQLNPQGDPEHSLLQVSSTGRALERRSLLSILPVLALPALL

SEQ ID NO: 2249 - protein, 162 aa, Homo sapiens
MGHKARLPAGTRVFHTSCVVGSLTPFRLGGGKADPPSACRAHLAQASPPRGCCSHFCPFPRPGPRSLRPYHKVRSFFHTVSWAWQSLHLVASIPSGPFERISWSSLSELPGLRALGRSLRSWRSAGGRVALSWLSECRARGDGTGALLLGLVVPAAGKGQLV

SEQ ID NO: 2250 - protein, 579 aa, Homo sapiens
MSALRPLLLLLLPLCPGPGPGPGSEAKVTRSCAETRQVLGARGYSLNLIPPALISGEHLRVCPQEYTCCSSETEQRLIRETEATFRGLVEDSGSFLVHTLAARHRKFDEFFLEMLSVAQHSLTQLFSHSYGRLYAQHALIFNGLFSRLRDFYGESGEGLDDTLADFWAQLLERVFPLLHPQYSFPPDYLLCLSRLASSTDGSLQPFGDSPRRLRLQITRTLVAARAFVQGLETGRNVVSEALKVPVSEGCSQALMRLIGCPLCRGVPSLMPCQGFCLNVVRGCLSSRGLEPDWGNYLDGLLILADKLQGPFSFELTAESIGVKISEGLMYLQENSAKVSAQVFQECGPPDPVPARNRRAPPPREEAGRLWSMVTEEERPTTAAGTNLHRLVWELRERLARMRGFWARLSLTVCGDSRMAADASLEAAPCWTGAGRGRYLPPVVGGSPAEQVNNPELKVDASGPDVPTRRRRLQLRAATARMKTAALGHDLDGQDADEDASGSGGGQQYADDWMAGAVAPPARPPRPPYPPRRDGSGGKGGGGSARYNQGRSRSGGASIGFHTQTILILSLSALALLGPR

SEQ ID NO: 2251 - protein, 535 aa, Homo sapiens
MLGPCMLLLLLLLGLRLQLSLGIIPVEEENPDFWNREAAEALGAAKKLQPAQTAAKNLIIFLGDGMGVSTVTAARILKGQKKDKLGPEIPLAMDRFPYVALSKTYNVDKHVPDSGATATAYLCGVKGNFQTIGLSAAARFNQCNTTRGNEVISVMNRAKKAGKSVGVVTTTRVQHASPAGTYAHTVNRNWYSDADVPASARQEGCQDIATQLISNMDIDVILGGGRKYMFRMGTPDPEYPDDYSQGGTRLDGKNLVQEWLAKRQGARYVWNRTELMQASLDPSVTHLMGLFEPGDMKYEIHRDSTLDPSLMEMTEAALRLLSRNPRGFFLFVEGGRIDHGHHESRAYRALTETIMFDDAIERAGQLTSEEDTLSLVTADHSHVFSFGGYPLRGSSIFGLAPGKARDRKAYTVLLYGNGPGYVLKDGARPDVTESESGSPEYRQQSAVPLDEETHAGEDVAVFARGPQAHLVHGVQEQTFIAHVMAFAACLEPYTACDLAPPAGTTDAAHPGRSVVPALLPLLAGTLLLLETATAP

SEQ ID NO: 2252 - protein, 255 aa, Homo sapiens
MGTATRRKPHLLLVAAVALVSSSAWSSALGSQTTFGPVFEDQPLSVLFPEESTEEQVLLACRARASPPATYRWKMNGTEMKLEPGSRHQLVGGNLVIMNPTKAQDAGVYQCLASNPVGTVVSREAILRFGFLQEFSKEERDPVKAHEGWGVMLPCNPPAHYPGLSYRWLLNEFPNFIPTDGRHFVSQTTGNLYIARTNASDLGNYSCLATSHMDFSTKSVFSKFAQLNLAAEDTRLFAPSIKARFPAETYALVGQ

SEQ ID NO: 2253 - protein, 440 aa, Homo sapiens
MAVKLGTLLLALALGLAQPASARRKLLVFLLDGFRSDYISDEALESLPGFKEIVSRGVKVDYLTPDFPSLSYPNYYTLMTGRHCEVHQMIGNYMWDPTTNKSFDIGVNKDSLMPLWWNGSEPLWVTLTKAKRKVYMYYWPGCEVEILGVRPTYCLEYKNVPTDINFANAVSDALDSFKSGRADLAAIYHERIDVEGHHYGPASPQRKDALKAVDTVLKYMTKWIQERGLQDRLNVIIFSDHGMTDIFWMDKVIELNKYISLNDLQQVKDRGPVVSLWPAPGKHSEIYNKLSTVEHMTVYEKEAIPSRFYYKKGKFVSPLTLVADEGWFITENREMLPFWMNSTGRREGWQRGWHGYDNELMDMRGIFLAFGPDFKSNFRAAPIRSVDVYNVMCNVVGITPLPNNGSWSRVMCMLKGRASTAPPVWPSHCALALILLFLLA

SEQ ID NO: 2254 - protein, 103 aa, Homo sapiens
MRQRLLPSVTSLLLVALLFPGSSQARHVNHSATEALGELRERAPGQGTNGFQLLRHAVKRDLLPPRTPPYQVHISHQEARGPSFKICVGFLGPRWARGCSTGN

SEQ ID NO: 2255 - protein, 185 aa, Homo sapiens
GETGRKLSLGPLSRGEWSSVWCPALGVVKLRLFLAPWSPARSCAKAPCAGLVLALWFPGGGAHRRLLPEPPFFSVSFSELFYPGGPLPLSGIDGDPRGRLALGPLALGSAPGELKLRPFLAPWSAALSCVSSSPQVGPLALTSIASTGWVKAEHDWCFVVPQNPGIHGLWVNGAARLLLGVTVLR

SEQ ID NO: 2256 - protein, 283 aa, Homo sapiens
MAHDLLFRLFPLLALGVPLQSNRLGPTSRLRYSRFLDPSNVIFLRWDFDLEAEIISFELQVRTAGWVGFGVTNRYTNVGSDLVVGGVLPNGNVYFSDQHLVEEDTLKEDGSQDAELLGLTEDAVYTTMHFSRPFRSCDPHDLDITSNTVRVLAAYGLDDTLKLYRERTFVKSIFLLQVVHPDDLDVPEDTIIHDLEITNFLIPEDDTTYACTFLPLPIVSEKHHIYKFEPKLVYHNETTVHHILVYACGNASVLPTGISDCYGADPAFSLCSQVIVGSAVGGT

SEQ ID NO: 2257 - protein, 520 aa, Homo sapiens
MAGARAAAAAASAGSSASSGNQPPQELGLGELLEEFSRTQYRAKDGSGTGGSKVERIEKRCLELFGRDYCFSVIPNTNGDICGHYPRHIVFLEYESSEKEKDTFESTVQVSKLQDLIHRSKMARCRGRFVCPVILFKGKHICRSATLAGWGELYGRSGYNYFFSGGADDAWADVEDVTEEDCALRSGDTHLFDKVRGYDIKLLRYLSVKYICDLMVENKKVKFGMNVTSSEKVDKAQRYADFTLLSIPYPGCEFFKEYKDRDYMAEGLIFNWKQDYVDAPLSIPDFLTHSLNIDWSQYQCWDLVQQTQNYLKLLLSLVNSDDDSGLLVHCISGWDRTPLFISLLRLSLWADGLIHTSLKPTEILYLTVAYDWFLFGHMLVDRLSKGEEIFFFCFNFLKHITSEEFSALKTQRRKSLPARDGGFTLEDICMLRRKDRGSTTSLGSDFSLVMESSPGATGSFTYGRGAGPSRSANSGSLEEEPLILSTECPLEPATTLRGPLAFPAGAGGSQVFQLLFLKPF

SEQ ID NO: 2258 - protein, 201 aa, Homo sapiens
MLAGVVVSCQSLQTSGASCSCCACSWTATSARRSGRAPRPCTAPCSRTWLPRPTSLAGAADPLPAPACFSPRRRPSISAPGKTSKGTGSGQPRAPGFQEVNRLRELEEAKHQGQRRPHADQPDEARACPCHRPDPSPLCKSLPLPPPRPPLLSARDGPLCLAHPSAPPSHLLFPKASVSIALVSLGLSPPHPPSSVSLSLM

SEQ ID NO: 2259 - protein, 153 aa, Homo sapiens
QVKYLLLSILGLAFLSEAAARKIPKVGHTFFQKPESCPPVPGGSMKLDIGIINENQRVSMSRNIESRSTSPWNYTVTWDPNRYPSEVVQAQCRNLGCINAQGKEDISMNSVPIQQETLVVRRKHQGCSVSFQLEKVLVTVGCTCVTPVIHHVQ

SEQ ID NO: 2260 - protein, 246 aa, Homo sapiens
MFLFPSFPVLLLSVVTASCSKTKACADTQKTCSMITCGIPVTNGTPGRDGRDRPKGEKGEPGQGLRGLQGPPGKMGPPGNTGTSGIPGPRGQKGDRGDNSGNSDCLPTVLRWAPNPASLTHHLWFAFSLGKMSGKKLFVTNGERMPFSKVKALCAGLQATVAAPKNAEENKAIQDVAKDTAFLGITDEATEGQFMYLTGRRLTYSNWKKDEPNDHGSGEDCVILLNNGLWNGISCTSSFIAICEFP

SEQ ID NO: 2261 - protein, 73 aa, Homo sapiens
GLKMICILYEPLMVQLTSTVRWCGRYCLLLTFLFFQIKGSWSNKRGKENYNPYSYGNIFTNCCVALCGPISPR

SEQ ID NO: 2262 - protein, 323 aa, Homo sapiens
MARGPGLAPPPLRLPLLLLVLAAVTGHTAAQDNCTCPTNKMTVCSPDGPGGRCQCRALGSGMAVDCSTLTSKCLLLKARMSAPKNARTLVRPSEHALVDNDGLYDPDCDPEGRFKARQCNQTSVCWCVNSVGVRRTDKGDLSLRCDELVRTHHILIDLRHRPTAGAFNHSDLDAELRRLFRERYRLHPKFVAAVHYEQPTIQIELRQNTSQKAAGDVDIGDAAYYFERDIKGESLFQGRGGLDLRVRGEPLQVERTLIYYLDEIPPKFSMKRLTAGLIAVIVVVVVALVAGMAVLVITNRRKSGKYKKVEIKELGELRKEPSL

SEQ ID NO: 2263 - protein, 70 aa, Homo sapiens
MDNYIILCVIIQILRYLFYCSICSSFGWWELFQVGSYIPLIYPYPFFEHYLTLCHYKMLYAHLVFFLPQC

SEQ ID NO: 2264 - protein, 791 aa, Homo sapiens
RYRDTLRRAILLLSPQGAHSFINEAVETNLASKDSHWVFVNEEISDPEILDLVHSALGRMTVVRQIFPSAKDNQKCTRNNHRISSLLCDPQEGYLQMLQISNLYLYDSVLMLANAFHRKLEDRKWHSMASLNCIRKSTKPWNGGRSMLDTIKKGHITGLTGVMEFREDSSNPYVQFEILGTTYSETFGKDMRKLATWDSEKGLNGSLQERPMGSRLQGLTLKVVTVLEEPFVMVAENILGQPKRYKGFSIDVLDALAKALGFKYEIYQAPDGRYGHQLHNTSWNGMIGELISKRADLAISAITITPERESVVDFSKRYMDYSVGILIKKPEEKISIFSLFAPFDFAVWACIAAAIPVVGVLIFVLNRIQAVRAQSAAQPRPSASATLHSAIWIVYGAFVQQGGESSVNSMAMRIVMGSWWLFTLIVCSSYTANLAAFLTVSRMDNPIRTFQDLSKQVEMSYGTVRDSAVYEYFRAKGTNPLEQDSTFAELWRTISKNGGADNCVSSPSEGIRKAKKGNYAFLWDVAVVEYAALTDDDCSVTVIGNSISSKGYGIALQHGSPYRDLFSQRILELQDTGDLDVLKQKWWPHMGRCDLTSHASAQADGKSLKLHSFAGVFCILAIGLLLACLVAALELWWNSNRCHQETPKEDKEVNLEQVHRRMNSLMDEDIAHKQISPASIELSALEMGGLAPTQTLEPTREYQNTQLSVSTFLPEQSSHGTSRTLSSGPSSNLPLPLSSSATMPSMQCKHRSPNGGLFRQSPVKTPIPMSFQPVPGGVLPEALDTSHGTSI

SEQ ID NO: 2265 - protein, 330 aa, Homo sapiens
MMWGAGSPLAWLSAGSGNVNVSSVGPAEGPTGPAAPLPSPKAWDVVLCISGTLVSCENALVVAIIVGTPAFRAPMFLLVGSLAVADLLAGLGLVLHFAAVFCIGSAEMSLVLVGVLAMAFTASIGSLLAITVDRYLSLYNALTYYSETTVTRTYVMLALVWGGALGLGLLPVLAWNCLDGLTTCGVVYPLSKNHLVVLAIAFFMVFGIMLQLYAQICRIVCRHAQQIALQRHLLPASHYVATRKGIATLAVVLGAFAACWLPFTVYCLLGDAHSPPLYTYLTLLPATYNSMINPIIYAFRNQDVQKVLWAVCCCCSSSKIPFRSRSPSDV

SEQ ID NO: 2266 - protein, 189 aa, Homo sapiens
MKTRASAVSDPGGLKLRDSLVLDMGFLATPWAPCIRQCPYHISTPVSYTWHQEGFLLLRLPLLEKNRSGRPQQSSPPKTPTAVLNAVDITALATGTLQSSASLPSADVAAPRLCRLCPNQNGNHIIPPSAQIVLTHLRKLKSSSIFSNHNGMKLEINRRKTRKFTNIVMCSIITFPSGTNCIYYCGPIR

SEQ ID NO: 2267 - protein, 601 aa, Homo sapiens
MESRVLLRTFCLIFGLGAVWGLGVDPSLQIDVLTELELGESTTGVRQVPGLHNGTKAFLFQDTPRSIKASTATAEQFFQKLRNKHEFTILVTLKQTHLNSGVILSIHHLDHRYLELESSGHRNEVRLHYRSGSHRPHTEVFPYILADDKWHKLSLAISASHLILHIDCNKIYERVVEKPSTDLPLGTTFWLGQRNNAHGYFKGIMQDVQLLVMPQGFIAQCPDLNRTCPTCNDFHGLVQKIMELQDILAKTSAKLSRAEQRMNRLDQCYCERTCTMKGTTYREFESWIDGCKNCTCLNGTIQCETLICPNPDCPLKSALAYVDGKCCKECKSICQFQGRTYFEGERNTVYSSSGVCVLYECKDQTMKLVESSGCPALDCPESHQITLSHSCCKVCKGYDFCSERHNCMENSICRNLNDRAVCSCRDGFRALREDNAYCEDIDECAEGRHYCRENTMCVNTPGSFMCICKTGYIRIDDYSCTEHDECITNQHNCDENALCFNTVGGHNCVCKPGYTGNGTTCKAFCKDGCRNGGACIAANVCACPQGFTGPSCETDIDECSDGFVQCDSRANCINLPGWYHCECRDGYHDNGMFSPSGESCE

SEQ ID NO: 2268 - protein, 510 aa, Homo sapiens
MSEELAQGPKESPPAPRAGPREVWKKGGRLLSVLLAVNVLLLACTLISGGAFNKVAVYDTDVFALLTAMMLLATLWILFYLLRTVRCPCAVPYRDAHAGPIWLRGARGGGLVLFGICTLIMDVFKTGYYSSFFECQSAIKILHPLIQAVFVIIQTYFLWVSAKDCVHVHLDLTWCGLMFTLTTNLAIWMAAVVDESVHQSHSYSSSHSNASHARLISDQHADNPVGGDSCLCSTAVCQIFQQGYFYLYPFNIEYSLFASTMLYVMWKNVGRFLASTPGHSHTPTPVSLFRETFFAGPVLGLLLFVVGLAVFIIYEVQVSGDGSRTRQALVIYYSFNIVCLGLTTLVSLSGSIIYRFDRRAMDHHKNPTRTLDVALLMGAALGQYAISYYSIVAVVAGTPQDLLAGLNLTHALLMIAQHTFQNMFIIESLHRGPPGAEPHSTHPKEPCQDLTFTNLDALHTLSACPPNPGLVSPSPSDQREAVAIVSTPRSQWRRQCLKDISLFLLLCNVI

SEQ ID NO: 2269 - protein, 856 aa, Homo sapiens
MGSLFRSETMCLAQLFLQSGTAYECLSALGEKGLVQFRDLNQNVSSFQRKFVGEVKRCEELERILVYLVQEINRADIPLPEGEASPPAPPLKQVLEMQEQLQKLEVELREVTKNKEKLRKNLLELIEYTHMLRVTKTFVKRNVEFEPTYEEFPSLESDSLLDYSCMQRLGAKLGFVSGLINQGKVEAFEKMLWRVCKGYTIVSYAELDESLEDPETGEVIKWYVFLISFWGEQIGHKVKKICDCYHCHVYPYPNTAEERREIQEGLNTRIQDLYTVLHKTEDYLRQVLCKAAESVYSRVIQVKKMKAIYHMLNMCSFDVTNKCLIAEVWCPEADLQDLRRALEEGSRESGATIPSFMNIIPTKETPPTRIRTNKFTEGFQNIVDAYGVGSYREVNPALFTIITFPFLFAVMFGDFGHGFVMFLFALLLVLNENHPRLNQSQEIMRMFFNGRYILLLMGLFSVYTGLIYNDCFSKSVNLFGSGWNVSAMYSSSHPPAEHKKMVLWNDSVVRHNSILQLDPSIPGVFRGPYPLGIDPIWNLATNRLTFLNSFKMKMSVILGIIHMTFGVILGIFNHLHFRKKFNIYLVSIPELLFMLCIFGYLIFMIFYKWLVFSAETSRVAPSILIEFINMFLFPASKTSGLYTGQEYVQRVLLVVTALSVPVLFLGKPLFLLWLHNGRSCFGVNRSGYTLIRKDSEEEVSLLGSQDIEEGNHQVEDGCREMACEEFNFGEILMTQVIHSIEYCLGCISNTASYLRLWALSLAHAQLSDVLWAMLMRVGLRVDTTYGVLLLLPVIALFAVLTIFILLIMEGLSAFLHAIRLHWVEFQNKFYVGAGTKFVPFSFSLLSSKFNNDDSVA

SEQ ID NO: 2270 - protein, 226 aa, Homo sapiens
MAAMRWRWWQRLLPWRLLQARGFPQNSAPSLGLGARTYSQGDCSYSRTALYDLLGVPSTATQAQIKAAYYRQCFLYHPDRNSGSAEAAERFTRISQAYVVLGSATLRRKYDRGLLSDEDLRGPGVRPSRTPAPDPGSPRTPPPTSRTHDGSRASPGANRTMFNFDAFYQAHYGEQLERERRLRARREALRKRQEYRSMKGLRWEDTRDTAAIFLIFSIFIIIGFYI

SEQ ID NO: 2271 - protein, 402 aa, Homo sapiens [sequence omitted]

SEQ ID NO: 2272 - protein, 314 aa, Homo sapiens
LQQWIQKLSKNTVTDDILCTSPGHLDKKELKALNSEILCPGLVNNPSMPTQTSYLMVTTPATTTNTADTILRSLTDAVPLSVLILGLLIMFITIVFCAAGIVVLVLHRRRRYKKKQVDEQMRDNSPVHLQYSMYGHKTTHHTTERPSASLYEQHMVSPMVHVYRSPSFGPKHLEEEEERNEKEGSDAKHLQRSLLEQENHSPLTGSNMKYKTTNQSTEFLSFQDASSLYRNILEKERELQQLGITEYLRKNIAQLQPDMEAHYPGAHEELKLMETLMYSRPRKVLVEQTKNEYFELKANLHAEPDYLEVLEQQT

SEQ ID NO: 2273 - protein, 632 aa, Homo sapiens
MSRVRDAGCVAAGIVIGAGAWYCVYKYTRGRDQTKKRMAKPKNRAVAGTGARARAGLRAGFTIDLGSGFSPPTPVRAEAEDRAQDEASALDTVGAEAVAPAASSAEAQSGAGSQAQEADGAGVGPKAESVVGAAMASAIAPPPGVTEALGAAEAPAMAGAPKVAEAPREAETSRAAVPPGTVVPTEAAAPTEVTEGPGVAAPTKVAEAPGVASPTEAAEAPVPATPTGAAAPTGAAESPGTSGSPRTAVVPGTSAAKKATPGAHTGAIPKATSATGAVPKGGGKGVTRSRNGGKGKGKKSKVEVDELGMGFRPGDGAAAAAAASANGGQAFLAEVPDSEEGESGWTDTESDSDSEPETQRRGRGRRPVAMQKRPFPYEIDEILGVRDLRKVLALLQKSDDPFIQQVALLTLSNNANYSCNQETIRKLGGLPIIANMINKTDPHIKEKALMAMNNLSENYENQGRLQVYMNKVMDDIMASNLNSAVQVVGLKFLTNMTITNDYQHLLVNSIANFFRLLSQGGGKIKVEILKILSNFAENPDMLKKLLSTQVPASFSSLYNSYVESEILINALTLFEIIYDNLRAEVFNYREFNKGSLFYLCTTSGVCVKKIRALANHHDLLVKVKVIKLVNKF

SEQ ID NO: 2274 - protein, 893 aa, Homo sapiens
VCQGPLDPVSHLPPPRSGGGGPRGDSGADRGAELPPVSPAEPPEPEPRDTVAPALRMLRTAMGLRSWLAAPWGALPPRPPLLLLLLLLLLLQPPPPTWALSPRISLPLGSEERPFLRFEAEHISNYTALLLSRDGRTLYVGAREALFALSSNLSFLPGGEYQELLWGADAEKKQQCSFKGKDPQRDCQNYIKILLPLSGSHLFTCGTAAFSPMCTYINMENFTLARDEKGNVLLEDGKGRCPFDPNFKSTALVVDGELYTGTVSSFQGNDPAISRSQSLRPTKTESSLNWLQDPAFVASAYIPESLGSLQGDDDKIYFFFSETGQEFEFFENTIVSRIARICKGDEGGERVLQQRWTSFLKAQLLCSRPDDGFPFNVLQDVFTLSPSPQDWRDTLFYGVFTSQWHRGTTEGSAVCVFTMKDVQRVFSGLYKEVNRETQQWYTVTHPVPTPRPGACITNSARERKINSSLQLPDRVLNFLKDHFLMDGQVRSRMLLLQPQARYQRVAVHRVPGLHHTYDVLFLGTGDGRLHKAVSVGPRVHIIEELQIFSSGQPVQNLLLDTHRGLLYAASHSGVVQVPMANCSLYRSCGDCLLARDPYCAWSGSSCKHVSLYQPQLATRPWIQDIEGASAKDLCSASSVVSPSFVPTGEKPCEQVQFQPNTVNTLACPLLSNLATRLWLRNGAPVNASASCHVLPTGDLLLVGTQQLGEFQCWSLEEGFQQLVASYCPEVVEDGVADQTDEGGSVPVIISTSRVSAPAGGKASWGADRSYWKEFLVMCTLFVLAVLLPVLFLLYRHRNSMKVFLKQGECASVHPKTCPVVLPPETRPLNGLGPPSTPLDHRGYQSLSDSPPGSRVFTESEKRPLSIQDSFVEVSPVCPRPRVRLGSEIRDSVV

SEQ ID NO: 2275 - protein, 455 aa, Homo sapiens
MSLTVVSMACVGFFLLQGAWPLMGGQDKPFLSARPSTVVPRGGHVALQCHYRRGFNNFMLYKEDRSHVPIFHGRIFQESFIMGPVTPAHAGTYRCRGSRPHSLTGWSAPSNPLVIMVTGNHRKPSLLAHPGPLLKSGETVILQCWSDVMFEHFFLHREGISEDPSRLVGQIHDGVSKANFSIGPLMPVLAGTYRCYGSVPHSPYQLSAPSDPLDIVITGLYEKPSLSAQPGPTVQAGENVTLSCSSWSSYDIYHLSREGEAHERRLRAVPKVNRTFQADFPLGPATHGGTYRCFGSFRALPCVWSNSSDPLLVSVTGNPSSSWPSPTEPSSKSGICRHLHVLIGTSVVIFLFILLLFFLLYRWCSNKKNAAVMDQEPAGDRTVNRQDSDEQDPQEVTYAQLDHCVFIQRKISRPSQRPKTPLTDTSVYTELPNAEPRSKVVSCPRAPQSGLEGVF

SEQ ID NO: 2276 - protein, 129 aa, Homo sapiens
MKIFYYALNLELYKTCTKIVQDKFHLVMSFPNTGLRLHWTLGICTKIISRSQMSLVHKHYHFKYYYLLPQQLYISIAFGWGRGTFLLQLEIALLVSYLFVVFKKYIVVRVIFSIYFIPGGDHATLSKEN

SEQ ID NO: 2277 - protein, 255 aa, Homo sapiens
NRSSLKTINVTETSLELSDLDYNVEYSAYVTASTRFGDGKTRSNIISFQTPEGAPSDPPKDVYYANLSSSSIILFWTPPSKPNGIIQYYSVYYRNTSGTFMQNFTLHEVTNDFDNMTVSTIIDKLTIFSYYTFWLTASTSVGNGNKSSDIIEVYTDQDIPETSPIINTFKNLSSTSVLLSWDPPVKPNGAIISYDLTLQGPNENYSFITSDNYIILEELSPFTLYSFFAAARTRKGLGPSSILFFYTDESVPLAP

SEQ ID NO: 2278 - protein, 469 aa, Homo sapiens
MSELIPKPLNAKKLHVNGNSIKDVDVSDFTDFEGLDLLHLGSNQITVIKGDVFHNLTNLRRLYLNGNQIERLYPEIFSGLHNLQYLYLEYNLIKEISAGTFDSMPNLQLLYLNNNLLKSLPVYIFSGAPLARLNLRNNKFMYLPVSGVLDQLQSLTQIDLEGNPWDCTCDLVALKLWVEKLSDGIVVKELKCETPVQFANIELKSLKNEILCPKLLNKPSAPFTSPAPAITFTTPLGPIRSPPGGPVPLSILILSILVVLILTVFVAFCLLVFVLRRNKKPTVKHEGLGNPDCGSMQLQLRKHDHKTNKKDGLSTEAFIPQTIEQMSKSHTCGLKESETGFMFSDPPGQKVVMRNVADKEKDLLHVDTRKRLSTIDELDELFPSRDSNVFIQNFLESKKEYNSIGVSGFEIRYPEKQPDKKSKKSLIGGNHSKIVVEQRKSEYFELKAKLQSSPDYLQVLEEQTALNKI

SEQ ID NO: 2279 - protein, 375 aa, Homo sapiens
MSMSPTVIILACLGFFLDQSVWAHVGGQDKPFCSAWPSAVVPQGGHVTLRCHYRRGFNIFTLYKKDGVPVPELYNRIFWNSFLISPVTPAHAGTYRCRGFHPHSPTEWSAPSNPLVIMVTGLYEKPSLTARPGPTVRAGENVTLSCSSQSSFDIYHLSREGEAHELRLPAVPSINGTFQADFPLGPATHGETYRCFGSFHGSPYEWSDPSDPLPVSVTGNPSSSWPSPTEPSFKTGIARHLHAVIRYSVAIILFTILPFFLLHRWCSKKAAVMNQEPAGHRTVNREDSDEQDPQEVTYAQLDHCIFTQRKITGPSQRSKRPSTDTSVCIELPNAEPRALSPAHEHHSQALMGSSRETTALSQTQLASSNVPAAGI

SEQ ID NO: 2280 - protein, 272 aa, Homo sapiens
MDSYLLMWGLLTFIMVPGCQAELCDDDPPEIPHATFKAMAYKEGTMLNCECKRGFRRIKSGSLYMLCTGNSSHSSWDNQCQCTSSATRNTTKQVTPQPEEQKERKTTEMQSPMQPVDQASLPGHCREPPPWENEATERIYHFVVGQMVYYQCVQGYRALHRGPAESVCKMTHGKTRWTQPQLICTGEMETSQFPGEEKPQASPEGRPESETSCLVTTTDFQIQTEMAATMETSIFTTEYQVAVAGCVFLLISVLLLSGLTWQRRQRKSRRTI

SEQ ID NO: 2281 - protein, 458 aa, Homo sapiens
MNRGVPFRHLLLVLQLALLPAATQGKKVVLGKKGDTVELTCTASQKKSIQFHWKNSNQIKILGNQGSFLTKGPSKLNDRADSRRSLWDQGNFPLIIKNLKIEDSDTYICEVEDQKEEVQLLVFGLTANSDTHLLQGQSLTLTLESPPGSSPSVQCRSPRGKNIQGGKTLSVSQLELQDSGTWTCTVLQNQKKVEFKIDIVVLAFQKASSIVYKKEGEQVEFSFPLAFTVEKLTGSGELWWQAERASSSKSWITFDLKNKEVSVKRVTQDPKLQMGKKLPLHLTLPQALPQYAGSGNLTLALEAKTGKLHQEVNLVVMRATQLQKNLTCEVWGPTSPKLMLSLKLENKEAKVSKREKAVWVLNPEAGMWQCLLSDSGQVLLESNIKVLPTWSTPVQPMALIVLGGVAGLLLFIGLGIFFCVRCRHRRRQAERMSQIKRLLSEKKTCQCPHRFQKTCSPI

SEQ ID NO: 2282 - protein, 223 aa, Homo sapiens
MACLGFQRHKAQLNLATRTWPCTLLFFLLFIPVFCKAMHVAQPAVVLASSRGIASFVCEYASPGKATEVRVTVLRQADSQVTEVCAATYMMGNELTFLDDSICTGTSSGNQVNLTIQGLRAMDTGLYICKVELMYPPPYYLGIGNGTQIYVIDPEPCPDSDFLLWILAAVSSGLFFYSFLLTAVSLSKMLKKRSPLTTGVYVKMPPTEPECEKQFQPYFIPIN

SEQ ID NO: 2283 - protein, 520 aa, Homo sapiens
MGKPSSMDTKFKDDLFRKYVQFHESKVDTTTSRQRPGSDECLRVAASTLLSLHKVDPFYRFRLIQFYEVVESSLRSLSSSSLRALHGAFSMLETVGINLFLYPWKKEFRSIKTYTGPFVYYVKSTLLEEDIRAILSCMGYTPELGTAYKLRELVETLQVKMVSFELFLAKVECEQMLEIHSQVKDKGYSELDIVSERKSSAEDVRGCSDALRRRAEGREHLTASMSRVALQKSASERAAKDYYKPRVTKPSRSVDAYDSYWESRKPPLKASLSLRKEPVATDVGDDLKDEIIRPSPSLLTMASSPHGSPDVLPPASPSNGPALLRGTYFSTQDDVDLYTDSEPRATYRRQDALRPDVWLLRNDAHSLYHKRSPPAKESALSKCQSCGLSCSSSLCQRCDSLLTCPPASKPSAFPSKASTHDSLAHGASLREKYPGQTQGLDRLPHLHSKSKPSTTPTSRCGFCNRPGATNTCTQCSKVSCDACLSAYHYDPCYKKSELHKFMPNNQLNYKSTQLSHLVYR

SEQ ID NO: 2284 - protein, 461 aa, Homo sapiens
MAPVAVWAALAVGLELWAAAHALPAQVAFTPYAPEPGSTCRLREYYDQTAQMCCSKCSPGQHAKVFCTKTSDTVCDSCEDSTYTQLWNWVPECLSCGSRCSSDQVETQACTREQNRICTCRPGWYCALSKQEGCRLCAPLRKCRPGFGVARPGTETSDVVCKPCAPGTFSNTTSSTDICRPHQICNVVAIPGNASMDAVCTSTSPTRSMAPGAVHLPQPVSTRSQHTQPTPEPSTAPSTSFLLPMGPSPPAEGSTGDFALPVGLIVGVTALGLLIIGVVNCVIMTQVKKKPLCLQREAKVPHLPADKARGTQGPEQQHLLITAPSSSSSSLESSASALDRRAPTRNQPQAPGVEASGAGEARASTGSSDSSPGGHGTQVNVTCIVNVCSSSDHSSQCSSQASSTMGDTDSSPSESPKDEQVPFSKEECAFRSQLETPETLLGSTEEKPLPLGVPDAGMKPS

SEQ ID NO: 2285 - protein, 255 aa, Homo sapiens
MADGPRCKRRKQANPRRNNVTNYNTVVETNSDSDDEDKLHIVEEESVTDAADCEGVPEDDLPTDQTVLPGRSSEREGNAKNCWEDDRKEGQEILGPEAQADEAGCTVKDDECESDAENEQNHDPNVEEFLQQQDTAVIFPEAPEEDQRQGTPEASGHDENGTPDAFSQLLTCPYCDRGYKRFTSLKEHIKYRHEKNEDNFSCSLCSYTFAYRTQLERHMTSHKSGRDQRHVTQSGCNRKFKCTECGKAFKYKHHL

SEQ ID NO: 2286 - protein, 224 aa, Homo sapiens
ERGSANFLALSAGAFSKAPQSSTSWGGSCRIKPAETPFLLTVPATAASASASQPLSEGKDKMKWKALFTAAILQAQLPITEAQSFGLLDPKLCYLLDGILFIYGVILTALFLRVKFSRSADAPAYQQGQNQLYNELNLGRREEYDVLDKRRGRDPEMGGKPRRKNPQEGLYNELQKDKMAEAYSEIGMKGERRRGKGHDGLYQGLSTATKDTYDALHMQALPPR

SEQ ID NO: 2287 - protein, 702 aa, Homo sapiens
MESPSAPPHRWCIPWQRLLLTASLLTFWNPPTTAKLTIESTPFNVAEGKEVLLLVHNLPQHLFGYSWYKGERVDGNRQIIGYVIGTQQATPGPAYSGREIIYPNASLLIQNIIQNDTGFYTLHVIKSDLVNEEATGQFRVYPELPKPSISSNNSKPVEDKDAVAFTCEPETQDATYLWWVNNQSLPVSPRLQLSNGNRTLTLFNVTRNDTASYKCETQNPVSARRSDSVILNVLYGPDAPTISPLNTSYRSGENLNLSCHAASNPPAQYSWFVNGTFQQSTQELFIPNITVNNSGSYTCQAHNSDTGLNRTTVTTITVYAEPPKPFITSNNSNPVEDEDAVALTCEPEIQNTTYLWWVNNQSLPVSPRLQLSNDNRTLTLLSVTRNDVGPYECGIQNKLSVDHSDPVILNVLYGPDDPTISPSYTYYRPGVNLSLSCHAASNPPAQYSWLIDGNIQQHTQELFISNITEKNSGLYTCQANNSASGHSRTTVKTITVSAELPKPSISSNNSKPVEDKDAVAFTCEPEAQNTTYLWWVNGQSLPVSPRLQLSNGNRTLTLFNVTRNDARAYVCGIQNSVSANRSDPVTLDVLYGPDTPIISPPDSSYLSGANLNLSCHSASNPSPQYSWRINGIPQQHTQVLFIAKITPNNNGTYACFVSNLATGRNNSIVKSITVSASGTSPGLSAGATVGIMIGVLVGVALI

SEQ ID NO: 2288 - protein, 234 aa, Homo sapiens
MAQHGAMGAFRALCGLALLCALSLGQRPTGGPGCGPGRLLLGTGTDARCCRVHTTRCCRDYPGEECCSEWDCMCVQPEFHCGDPCCTTCRHHPCPPGQGVQSQGKFSFGFQCIDCASGTFSGGHEGHCKPWTDCTQFGFLTVFPGNKTHNAVCVPGSPPAEPLGWLTVVLLAVAACVLLLTSAQLGLHIWQLRKTQLLLEVPPSTEDARSCQFPEEERGERSAEEKGRLGDLWV

SEQ ID NO: 2289 - protein, 314 aa, Homo sapiens [sequence omitted]

SEQ ID NO: 2290 - protein, 255 aa, Homo sapiens
MHGYDAPIYTNVTYPITVNPPFVPTENPTGCYSLTFNVDESWLQEGQTRIIFDGVNSAFHLWCNGRWVGYGQDSRLPSEFDLSAFLRAGENRLAVMVLRWSDGSYLEDQDMWRMSGIFRDVSLLHKPTTQISDFHVATRFNDDFSRAVLEAEVQMCGELRDYLRVTVSLWQGETQVASGTAPFGGEIIDERGGYADRVTLRLNVENPKLWSAEIPNLYRAVVELHTADGTLIEAEACDVGFREVRIENGLLLLNG

SEQ ID NO: 2291 - protein, 264 aa, Homo sapiens [sequence omitted]

SEQ ID NO: 2292 - protein, 286 aa, Homo sapiens
MSIQHFRVALIPFFAAFCLPVFAHPETLVKVKDAEDQLGARVGYIELDLNSGKILESFRPEERFPMMSTFKVLLCGAVLSRIDAGQEQLGRRIHYSQNDLVEYSPVTEKHLTDGMTVRELCSAAITMSDNTAANLLLTTIGGPKELTAFLHNMGDHVTRLDRWEPELNEAIPNDERDTTMPVAMATTLRKLLTGELLTLASRQQLIDWMEADKVAGPLLRSALPAGWFIADKSGAGERGSRGIIAALGPDGKPSRIVVIYTTGSQATMDERNRQIAEIGASLIKHW

SEQ ID NO: 2293 - DNA, 50 bp, Artificial Sequence
  Synthetic construct
acaaagcagcaccatttagctgtagacctttatcatggggtcatatattg

SEQ ID NO: 2294 - DNA, 50 bp, Artificial Sequence
  Synthetic construct
gcaagttttggtgctactgtttttgcagttttgggctttgctatgtacaa

SEQ ID NO: 2295 - DNA, 50 bp, Artificial Sequence
  Synthetic construct
gaggaggactcaggcacctaccgctgcatggccgacaatggggttgggca

SEQ ID NO: 2296 - DNA, 50 bp, Artificial Sequence
  Synthetic construct
agggccaccctgccaagctctccaacctgtcactggcaagctgggagtgc

SEQ ID NO: 2297 - DNA, 50 bp, Artificial Sequence
  Synthetic construct
agcaggcagttacaagcgtgtcattttcagtggctccattttaaatcagt

SEQ ID NO: 2298 - DNA, 50 bp, Artificial Sequence
  Synthetic construct
cttggacttattgtacttctattgatctcatatgttatgtggaaggctgg

SEQ ID NO: 2299 - DNA, 50 bp, Artificial Sequence
  Synthetic construct
agttaccagtaaatccctccagtgtggttagcgaaaggattagcagtgtg

SEQ ID NO: 2300 - DNA, 50 bp, Artificial Sequence
  Synthetic construct
ggtgatggacttcgtcctcatgttgctggacacgctttttggggaactgg

SEQ ID NO: 2301 - DNA, 50 bp, Artificial Sequence
  Synthetic construct
acaaagaaagtgaggacggggaagatgaagtgagctgtgagactgtgaag

SEQ ID NO: 2302 - DNA, 50 bp, Artificial Sequence
  Synthetic construct
aatggacttgggcaaaattcggacaatggattattggttacacatgttaa

SEQ ID NO: 2303 - DNA, 50 bp, Artificial Sequence
  Synthetic construct
ctctggtttgatgcctatgcactgaggaggcagaagtatgatttgccgtg

SEQ ID NO: 2304 - DNA, 50 bp, Artificial Sequence
  Synthetic construct
cctgtacgctgccgtgtacccctccacccagttcggcctcacgggactgc

SEQ ID NO: 2305 - DNA, 50 bp, Artificial Sequence
  Synthetic construct
ccagccaccccactggcttcaggcaaggagatggccgagggcgctgcgag

SEQ ID NO: 2306 - DNA, 50 bp, Artificial Sequence
  Synthetic construct
gtggtgtgtgttttattcgtcttttggaatctattggatatggttaggta

SEQ ID NO: 2307 - DNA, 50 bp, Artificial Sequence
  Synthetic construct
tgggattcttgttggactaatgtacactcaagggcctctgaagaaaatca

SEQ ID NO: 2308 - DNA, 50 bp, Artificial Sequence
  Synthetic construct
gatggagatgaaggcaacaataaatttcttccacattttacaggtacact

SEQ ID NO: 2309 - DNA, 50 bp, Artificial Sequence
  Synthetic construct
accagtaactgacaaaatccacaaagcatataaggacaaaaacaaatata

SEQ ID NO: 2310 - DNA, 50 bp, Artificial Sequence
  Synthetic construct
atggttagaggaagcatccattgattttcgatttggcaaaacttacctga

SEQ ID NO: 2311 - DNA, 50 bp, Artificial Sequence
  Synthetic construct
cggggggagaacggcattcagacacggacagtgacaggagggaagatgat

SEQ ID NO: 2312 - DNA, 50 bp, Artificial Sequence
  Synthetic construct
acttcgtaccctttcatatttttaatctgatactaatgttgttgtatttt

SEQ ID NO: 2313 - DNA, 50 bp, Artificial Sequence
  Synthetic construct
gcggtaaaactggctaagtactatcgtcgaatggattcggaggacgtgta

SEQ ID NO: 2314 - DNA, 50 bp, Artificial Sequence
  Synthetic construct
cccaactcggaaggaagcagccttcagaatcagccgctggagctgcggga

SEQ ID NO: 2315 - DNA, 50 bp, Artificial Sequence
  Synthetic construct
gtgctggagctgaccgctgaggacctgacgcagatgggaatcacactgcc

SEQ ID NO: 2316 - DNA, 50 bp, Artificial Sequence
  Synthetic construct
tcggctactccttactcactggttatgtcttcttcctcatgctgggcacc

SEQ ID NO: 2317 - DNA, 50 bp, Artificial Sequence
  Synthetic construct
agccagtggcgacgggggattctacgatccgaaagctcaggtgttgggaa

SEQ ID NO: 2318 - DNA, 50 bp, Artificial Sequence
  Synthetic construct
accccatctatgatgctctgtcctatagcagcccctctgattcctaccag

SEQ ID NO: 2319 - DNA, 50 bp, Artificial Sequence
  Synthetic construct
tttgtattacaaatgcggtgcccagtttgctttggtaacccttggaacac

SEQ ID NO: 2320 - DNA, 50 bp, Artificial Sequence
  Synthetic construct
caggacagtggtgggctttgggatggaccctgaccttcagatggatatcg

SEQ ID NO: 2321 - DNA, 50 bp, Artificial Sequence
  Synthetic construct
caggtcatcttggtggctgtacctagcgtcctctacatgggtttcactct

SEQ ID NO: 2322 - DNA, 50 bp, Artificial Sequence
  Synthetic construct
ttcagagagcaccagaagacacaagaaagcaaccgatagcctcccagtgg

SEQ ID NO: 2323 - DNA, 50 bp, Artificial Sequence
  Synthetic construct
aagtggtacaagatggtgccttgcggcaagcgggtctttgcggttacaga

SEQ ID NO: 2324 - DNA, 50 bp, Artificial Sequence
  Synthetic construct
gctgctctacgacaccttctgcgagcacctgtccatgaaggacatagaga

SEQ ID NO: 2325 - DNA, 50 bp, Artificial Sequence
  Synthetic construct
tgaatttctcttattgggcctcacagatcatccctatcagaagattgttc

SEQ ID NO: 2326 - DNA, 50 bp, Artificial Sequence
  Synthetic construct
cagtgcaaccttctccctggatctcaataaagtagtgtctgtgttttaca

SEQ ID NO: 2327 - DNA, 50 bp, Artificial Sequence
  Synthetic construct
accttcatctaaacaccagttactgtcaccagccactaaggagaaactgc

SEQ ID NO: 2328 - DNA, 50 bp, Artificial Sequence
  Synthetic construct
gtcattcaagacacagatatgcacttatacccataccattagcagtaatt

SEQ ID NO: 2329 - DNA, 50 bp, Artificial Sequence
  Synthetic construct
catgtctcatcttcgtcttcggactggcctaaccaattctcaaggaagtt

SEQ ID NO: 2330 - DNA, 50 bp, Artificial Sequence
  Synthetic construct
agaaaagcgaaggcgaaatagcctctactgcattacaagcaacatcagga

SEQ ID NO: 2331 - DNA, 50 bp, Artificial Sequence
  Synthetic construct
gcctctacatgaaatctgtcgcaggcattggacaaactgggaagattgag

SEQ ID NO: 2332 - DNA, 50 bp, Artificial Sequence
  Synthetic construct
cttattggcccttgtccatctagtgttactgctaccactgtccttctgtg

SEQ ID NO: 2333 - DNA, 50 bp, Artificial Sequence
  Synthetic construct
ccaaacatgcttctcccattgtccacacacttatgtctagcatctgcctt

SEQ ID NO: 2334 - DNA, 50 bp, Artificial Sequence
  Synthetic construct
tgtgaaaaccaaggagatccgcaaagggattctcaagttcttccataaat

SEQ ID NO: 2335 - DNA, 50 bp, Artificial Sequence
  Synthetic construct
agattcagaatgccattcttcacctttttactacccatagaattggaacc

SEQ ID NO: 2336 - DNA, 50 bp, Artificial Sequence
  Synthetic construct
ggatctgtggtcctctcccactcattttgcctgcaccaggaagtgataca

SEQ ID NO: 2337 - DNA, 50 bp, Artificial Sequence
  Synthetic construct
ttgctttctttacatttttgtttccccatcaaaatctcacatcttactat

SEQ ID NO: 2338 - DNA, 50 bp, Artificial Sequence
  Synthetic construct
tatcggaatcatcaccatctgtgtatgtgtgattgaggtgttggggatgt

SEQ ID NO: 2339 - DNA, 50 bp, Artificial Sequence
  Synthetic construct
catgctagtgagtcccacgaattcagttcccacgccaaaccagaccccat

SEQ ID NO: 2340 - DNA, 50 bp, Artificial Sequence
  Synthetic construct
tggcttcctgctggaaatagtgagcttcctactcaggccaatttacacct

SEQ ID NO: 2341 - DNA, 50 bp, Artificial Sequence
  Synthetic construct
gggcaagtaccattgcttccatctgctttgacagtgtacccatttcccat

SEQ ID NO: 2342 - DNA, 50 bp, Artificial Sequence
  Synthetic construct
aattcacccatttggttctatgattattgggagcattgcaggaatggtct

SEQ ID NO: 2343 - DNA, 50 bp, Artificial Sequence
  Synthetic construct
catgtcatctggtcctacctaattgcacggattgctttgaaagccttgat

SEQ ID NO: 2344 - DNA, 50 bp, Artificial Sequence
  Synthetic construct
atgatgatgcagtcagggcgcaaaggaactgacatcatgtacacaggcac

SEQ ID NO: 2345 - DNA, 50 bp, Artificial Sequence
  Synthetic construct
atggcaagcatatggctgtcctataagatctcgtgtgtaacccagtccac

SEQ ID NO: 2346 - DNA, 50 bp, Artificial Sequence
  Synthetic construct
ccatccccggccagcacgtcactctgcctcggaagacatcctcaggttct

SEQ ID NO: 2347 - DNA, 50 bp, Artificial Sequence
  Synthetic construct
ataattaccattttggtacagcacaagtaccctaatttagttcttttgga

SEQ ID NO: 2348 - DNA, 50 bp, Artificial Sequence
  Synthetic construct
gtgagctgccaggccaacaacttctcctctgtgccgctgtccctgccacc

SEQ ID NO: 2349 - DNA, 50 bp, Artificial Sequence
  Synthetic construct
tgcctgttggcataatgggatgtcagaaagaaacttgtctgccctggaga

SEQ ID NO: 2350 - DNA, 50 bp, Artificial Sequence
  Synthetic construct
cctttgtttcctaccttttgaatcagattccgttttagtcaggaagactt

SEQ ID NO: 2351 - DNA, 50 bp, Artificial Sequence
  Synthetic construct
agtttcctgaagggttccagtttgacactgacgatgtgaatttccctatc

SEQ ID NO: 2352 - DNA, 50 bp, Artificial Sequence
  Synthetic construct
atttctgccaagaaaaacaagtggcttactgcccttctggcaagcctgaa

SEQ ID NO: 2353 - DNA, 50 bp, Artificial Sequence
  Synthetic construct
caactgctgcgagcctggcatcgccacgggcactgagaggaacttcacag

SEQ ID NO: 2354 - DNA, 50 bp, Artificial Sequence
  Synthetic construct
ggcgcttcacccagtggtactttggtgcctactccattgtggcgggcgtg

SEQ ID NO: 2355 - DNA, 50 bp, Artificial Sequence
  Synthetic construct
cacacggcacgacttcatcgagaccaacggggacaactgcctggtgacac

SEQ ID NO: 2356 - DNA, 50 bp, Artificial Sequence
  Synthetic construct
atagtagcaccagaaattctaaatcaaatgttaagatgttcagtgtttcc

SEQ ID NO: 2357 - DNA, 50 bp, Artificial Sequence
  Synthetic construct
tccgcccggaagatggaggtcaagcagaaggggcagaggatgaactggaa

SEQ ID NO: 2358 - DNA, 50 bp, Artificial Sequence
  Synthetic construct
ggtccgctaccggagggccgcatcccacgaggagtctgagtctgagatcc

SEQ ID NO: 2359 - DNA, 50 bp, Artificial Sequence
  Synthetic construct
ataataggaagtataattgctggaatccttttgctgttagctctggttgc

SEQ ID NO: 2360 - DNA, 50 bp, Artificial Sequence
  Synthetic construct
ttctgagaacgccactgaggagcttgaaccaagtccacccctgcggcagc

SEQ ID NO: 2361 - DNA, 50 bp, Artificial Sequence
  Synthetic construct
ctctcttttctcctcacgttttctctctgttgttacttgccgtgttcaca

SEQ ID NO: 2362 - DNA, 50 bp, Artificial Sequence
  Synthetic construct
atgtggcctggaatgaaggctcacgacagtggcgtgaaggcaaacaggat

SEQ ID NO: 2363 - DNA, 50 bp, Artificial Sequence
  Synthetic construct
tacctcttccaccctctggcttacgggatggttggtcccctggcccagga

SEQ ID NO: 2364 - DNA, 50 bp, Artificial Sequence
  Synthetic construct
aaatgaccatcacctcgttttatgccgtgtgcttttacctgctgatgctg

SEQ ID NO: 2365 - DNA, 50 bp, Artificial Sequence
  Synthetic construct
agagcctttgcttcatccaccgctactaccgaaggagcccccacaggccc

SEQ ID NO: 2366 - DNA, 50 bp, Artificial Sequence
  Synthetic construct
ctggcagccccaggcgtacatccagggtgtcagggcacacgaagattccg

SEQ ID NO: 2367 - DNA, 50 bp, Artificial Sequence
  Synthetic construct
aggcccagaaaagcagcgatacgctgacccgacacgagccattactcccg

SEQ ID NO: 2368 - DNA, 50 bp, Artificial Sequence
  Synthetic construct
tagtgggcgctactgccagcctgaagaggaagtggctcgactcttgacca

SEQ ID NO: 2369 - DNA, 50 bp, Artificial Sequence
  Synthetic construct
tgaccagtaccgcaaggggatcatctcgggctccgtctgccaggacctgt

SEQ ID NO: 2370 - DNA, 50 bp, Artificial Sequence
  Synthetic construct
gaccctgggcgtgggctccctcctggcgggctttgtgggagaatccacca

SEQ ID NO: 2371 - DNA, 50 bp, Artificial Sequence
  Synthetic construct
gaggacgagctgggggcggaggtgggcgacgaggcgggagacaagaagag

SEQ ID NO: 2372 - DNA, 50 bp, Artificial Sequence
  Synthetic construct
cagaactactttggggaggatgatcttctgatttctgaaccacctattgt

SEQ ID NO: 2373 - DNA, 50 bp, Artificial Sequence
  Synthetic construct
gctctacatcttctccaccgtcagcaagatggggcttgaggccaccatcg

SEQ ID NO: 2374 - DNA, 50 bp, Artificial Sequence
  Synthetic construct
ccccaagatagtacatgcttttgacatggaggatttgggagataaagctg

SEQ ID NO: 2375 - DNA, 50 bp, Artificial Sequence
  Synthetic construct
acattctctatcattgatcattgattctgctggcccactctattatgtgc

SEQ ID NO: 2376 - DNA, 50 bp, Artificial Sequence
  Synthetic construct
gacgaagtatattatgggcagtacatctctttttacatgaaacaaatctt

SEQ ID NO: 2377 - DNA, 50 bp, Artificial Sequence
  Synthetic construct
aagaatgggaccctttcctctgtcacctccgcacgagccctccggccacc

SEQ ID NO: 2378 - DNA, 50 bp, Artificial Sequence
  Synthetic construct
gtctgcatgtctgcgtgtacctgagtgtgagcatgtgtctgtgtgtgtct

SEQ ID NO: 2379 - DNA, 50 bp, Artificial Sequence
  Synthetic construct
tttatcgattttggtgttgttcagagatactttcctaaccccaacaagca

SEQ ID NO: 2380 - DNA, 50 bp, Artificial Sequence
  Synthetic construct
tgggaaattgccaagcccctgaaacacaagcaagtagatgaagaaaagat

SEQ ID NO: 2381 - DNA, 50 bp, Artificial sequence
  Synthetic construct
tctccatgctgaatgactcggatgatgatgtgatttatgggagtgactat

SEQ ID NO: 2382 - DNA, 50 bp, Artificial sequence
  Synthetic construct
caatagtaaagcctgtaagacatgataggattattttcccctttggattt

SEQ ID NO: 2383 - DNA, 50 bp, Artificial sequence
  Synthetic construct
ctgcaacaaagtgctcgtgattccaatttgttttagagagatgaagcagc

SEQ ID NO: 2384 - DNA, 50 bp, Artificial sequence
  Synthetic construct
tggtgcaggttgactgggcagagtgacgatgagccaaagcggatcaagaa

SEQ ID NO: 2385 - DNA, 50 bp, Artificial sequence
  Synthetic construct
aaaccccaggagagaaggcggaagcagcagcgactctaaaggcagcccca

SEQ ID NO: 2386 - DNA, 50 bp, Artificial sequence
  Synthetic construct
gggagaacacggttcccgaccgctgctgcatggagaactcccagggctgc

SEQ ID NO: 2387 - DNA, 50 bp, Artificial sequence
  Synthetic construct
tcgacaataaattccacatcatcggcgcagtgggcatcggcattgccgtg

SEQ ID NO: 2388 - DNA, 50 bp, Artificial sequence
  Synthetic construct
cgccgctacggctttgctgccctgaaatatctcacagccgagaacaacag

SEQ ID NO: 2389 - DNA, 50 bp, Artificial sequence
  Synthetic construct
cgtccatcagcagatacgactcctccttcaggtatacgggcagccccgac

SEQ ID NO: 2390 - DNA, 50 bp, Artificial sequence
  Synthetic construct
gttcatggcttcagacctgtcaaggccccaggaacattccacatggtcca

SEQ ID NO: 2391 - DNA, 50 bp, Artificial sequence
  Synthetic construct
tgacgcggcttcctgcggttctgaagttaagaagtggtggacccggcagc

SEQ ID NO: 2392 - DNA, 50 bp, Artificial sequence
  Synthetic construct
cctactgtttcctagtctttgctacaatttgtatcacaggtgctatctac

SEQ ID NO: 2393 - DNA, 50 bp, Artificial sequence
  Synthetic construct
tcctgtcattagtcatcacacctgtcatccgggctaaactctccaagctg

SEQ ID NO: 2394 - DNA, 50 bp, Artificial sequence
  Synthetic construct
tgaatggaggtcagaaatcatcaacagcaaaaacttcgaccgagagattg

SEQ ID NO: 2395 - DNA, 50 bp, Artificial sequence
  Synthetic construct
cctaaggatggcagccttctcatggctcattggtttcggcaactcagtgc

SEQ ID NO: 2396 - DNA, 50 bp, Artificial sequence
  Synthetic construct
ccccaccctccacccattgaagtccttaactgccctcaccgtgctggagt

SEQ ID NO: 2397 - DNA, 50 bp, Artificial sequence
  Synthetic construct
ggatattttgcaccatttccctctgtacttatgccgccagtatctcgtat

SEQ ID NO: 2398 - DNA, 50 bp, Artificial sequence
  Synthetic construct
tgccctgctgatctacatgatggctactacatataactatgcggttttga

SEQ ID NO: 2399 - DNA, 50 bp, Artificial sequence
  Synthetic construct
aaaagccaaataagaaagaacagcttactctagtaaacaatgtattaaag

SEQ ID NO: 2400 - DNA, 50 bp, Artificial sequence
  Synthetic construct
gaccagtctctgtcggctgctgaggagcatttggaagtccttcgagaagc

SEQ ID NO: 2401 - DNA, 50 bp, Artificial sequence
  Synthetic construct
ggctatgacatgagcacacccaacgcacccctgcactactatgagaccgt

SEQ ID NO: 2402 - DNA, 50 bp, Artificial sequence
  Synthetic construct
tcctgaatacagtaaagccagtggagttcaaaaacacagtaacagcagca

SEQ ID NO: 2403 - DNA, 50 bp, Artificial sequence
  Synthetic construct
aatgtccctcgaagttggagtgccaaactgtatcttacaccaagtaatat

SEQ ID NO: 2404 - DNA, 50 bp, Artificial sequence
  Synthetic construct
gctccaccgaaagcccctcccaacggacactggcgcaccgagaccacctc

SEQ ID NO: 2405 - DNA, 50 bp, Artificial sequence
  Synthetic construct
tgatagtgctcacctcctggatcaccatcttccagatctaccggccccgc

SEQ ID NO: 2406 - DNA, 50 bp, Artificial sequence
  Synthetic construct
gcgtgtcctgctgcaccctctcgatgcccaacaacgtgactcgggaatcc

SEQ ID NO: 2407 - DNA, 50 bp, Artificial sequence
  Synthetic construct
aaattgaatgcatagaaattcaagagaacccggatcacgtcaccacagta

SEQ ID NO: 2408 - DNA, 50 bp, Artificial sequence
  Synthetic construct
ctgacgtggtgggccgtgtgccgagactccgtgtactacaccatctctgt

SEQ ID NO: 2409 - DNA, 50 bp, Artificial sequence
  Synthetic construct
catgggaatcatcgctggagtggcgtttggaatcgcattctcccagttaa

SEQ ID NO: 2410 - DNA, 50 bp, Artificial sequence
  Synthetic construct
ggctatgacagttctgtaaggaagagcccaacactgctggaagtgagcat

SEQ ID NO: 2411 - DNA, 50 bp, Artificial sequence
  Synthetic construct
gtttctggtgtcaccgctgatcattagccatgaaattaaccaacagagtc

SEQ ID NO: 2412 - DNA, 50 bp, Artificial sequence
  Synthetic construct
ctggactcaacagagtagcagaatatcgaaatcattggtcagatgttata

SEQ ID NO: 2413 - DNA, 50 bp, Artificial sequence
  Synthetic construct
cgcccagcagcccgccgctctccatcatgggcctcatgccgctcaccaag

SEQ ID NO: 2414 - DNA, 50 bp, Artificial sequence
  Synthetic construct
agaatgacagtggtggtcctcaaagccagacacttgccgaagatggatat

SEQ ID NO: 2415 - DNA, 50 bp, Artificial sequence
  Synthetic construct
tcagcttccttgacaaactgatccgaaatcccagtgcccttcacaccctg

SEQ ID NO: 2416 - DNA, 50 bp, Artificial sequence
  Synthetic construct
ccccaagggcactggaaatttgcagtttcagcaagggcaggaggcccagc

SEQ ID NO: 2417 - DNA, 50 bp, Artificial sequence
  Synthetic construct
acattgtgcccgaagcccttttcctaccccgacggactccaacagctcgc

SEQ ID NO: 2418 - DNA, 50 bp, Artificial sequence
  Synthetic construct
cagagaatgctaagaattgcagaaccagatgcaagattcagtggcttcta

SEQ ID NO: 2419 - DNA, 50 bp, Artificial sequence
  Synthetic construct
ggaaaccaaccaagtaaatcccttctctaattttcttcatgttgacccta

SEQ ID NO: 2420 - DNA, 50 bp, Artificial sequence
  Synthetic construct
atcagccccggctacatccacaccaacctctctgtaaatgccatcaccgc

SEQ ID NO: 2421 - DNA, 50 bp, Artificial sequence
  Synthetic construct
gtccttatgaccctgctgggactcctgggcagcctgttcttcctgggcca

SEQ ID NO: 2422 - DNA, 50 bp, Artificial sequence
  Synthetic construct
ccgagcaccccaggagtatacaccaaggtctcagcctatctcaactggat

SEQ ID NO: 2423 - DNA, 50 bp, Artificial sequence
  Synthetic construct
aagaagtctcacaaacagccatttggaaaaaaagaagtgtgatgagtata

SEQ ID NO: 2424 - DNA, 50 bp, Artificial sequence
  Synthetic construct
ttgaagattgtgattgacttccgtaaaactgtacaactctccatttggca

SEQ ID NO: 2425 - DNA, 50 bp, Artificial sequence
  Synthetic construct
accggaaccgagacttccgctacacttttcacaaaattatctccaggtat

SEQ ID NO: 2426 - DNA, 50 bp, Artificial sequence
  Synthetic construct
gagtttgacaaccccatttacgagacaggggaaaccagagagtatgaggt

SEQ ID NO: 2427 - DNA, 50 bp, Artificial sequence
  Synthetic construct
aaacaagccaacggcggggcctaccagaagcccaccaaacaggaggaatt

SEQ ID NO: 2428 - DNA, 50 bp, Artificial sequence
  Synthetic construct
aaactctgggagaagcacttcaaggggttgaattggaatttagtggtctg

SEQ ID NO: 2429 - DNA, 50 bp, Artificial sequence
  Synthetic construct
caagtgcgtgaagaagagcaagcggcggcgctccaacaggtcagcccagc

SEQ ID NO: 2430 - DNA, 50 bp, Artificial sequence
  Synthetic construct
atctccattttgtttgcttctgattgttgctctgaccttctacctattga

SEQ ID NO: 2431 - DNA, 50 bp, Artificial sequence
  Synthetic construct
tggattgctgcttgcctcttttctacaagcctttttgggcttttctatca

SEQ ID NO: 2432 - DNA, 50 bp, Artificial sequence
  Synthetic construct
gactactttgatacgacaccgcatggcttcgagactcacacgctggagga

SEQ ID NO: 2433 - DNA, 50 bp, Artificial sequence
  Synthetic construct
ggcaggggggagccagccaaagtgacaagacacccgaggagctgttccat

SEQ ID NO: 2434 - DNA, 50 bp, Artificial sequence
  Synthetic construct
tggtggaggcgttcttataccacgttccacggaggagtgaggagcccagg

SEQ ID NO: 2435 - DNA, 50 bp, Artificial sequence
  Synthetic construct
taccttccacacccataccttccacacccataccttccacacctttgttc

SEQ ID NO: 2436 - DNA, 50 bp, Artificial sequence
  Synthetic construct
gacgcctacgacggcaaggattacatcgccctgaacgaggacctgcgctc

SEQ ID NO: 2437 - DNA, 50 bp, Artificial sequence
  Synthetic construct
tggttgcccacaacacctggaacaactaccagcacatgctgcgtgtcatc

SEQ ID NO: 2438 - DNA, 50 bp, Artificial sequence
  Synthetic construct
gtactccctgcccttaaagagcatctacatgcgacagattgaccagatgg

SEQ ID NO: 2439 - DNA, 50 bp, Artificial sequence
  Synthetic construct
aaagagaaaaccattaatcagaccatcggcaacgtcgtctaccatgctgc

SEQ ID NO: 2440 - DNA, 50 bp, Artificial sequence
  Synthetic construct
aaagtcattttgggaaccgattacccctttccactaggtgagctggaacc

SEQ ID NO: 2441 - DNA, 50 bp, Artificial sequence
  Synthetic construct
ttataggcactgccctctacaatgggctacaccgtccgctgctgggccgc

SEQ ID NO: 2442 - DNA, 50 bp, Artificial sequence
  Synthetic construct
cccggttcgaggtggctgacgaagacaagcacaacccccctgagacctgt

SEQ ID NO: 2443 - DNA, 50 bp, Artificial sequence
  Synthetic construct
agccctgagagcttcaaacaatgacctcaatgtcgccaccaacttcctgc

SEQ ID NO: 2444 - DNA, 50 bp, Artificial sequence
  Synthetic construct
agggggccacacgaccatccagcttgacagcagccatgtcagtgtgccat

SEQ ID NO: 2445 - DNA, 50 bp, Artificial sequence
  Synthetic construct
tgagaatcggcttctataacttctgcctgtggaatgaggacaccagcacc

SEQ ID NO: 2446 - DNA, 50 bp, Artificial sequence
  Synthetic construct
cccgaccccaacaacaccggcttcatcaatcaggacttcgtggtgtggat

SEQ ID NO: 2447 - DNA, 50 bp, Artificial sequence
  Synthetic construct
atcccaaggatgacggcatcgtctatgcttcccttgccctctccagctcc

SEQ ID NO: 2448 - DNA, 50 bp, Artificial sequence
  Synthetic construct
tatggtttgggtatggtttgcttgcccccaccaaaactcatgttgaaatt

SEQ ID NO: 2449 - DNA, 50 bp, Artificial sequence
  Synthetic construct
gaaaatggcgaagccggtgcccgaccccgtccgcgagccgggattacagg

SEQ ID NO: 2450 - DNA, 50 bp, Artificial sequence
  Synthetic construct
tccaggagattagggtctgtgagatccatgaagacaacagcaccaggagc

SEQ ID NO: 2451 - DNA, 50 bp, Artificial sequence
  Synthetic construct
tagtcaggaagaagtcatccgtgcttatgacaccaccaaaaagaaatcca

SEQ ID NO: 2452 - DNA, 50 bp, Artificial sequence
  Synthetic construct
aagaaagagttggtggtccagatagcagacgtgttcgtacccggagcctc

SEQ ID NO: 2453 - DNA, 50 bp, Artificial sequence
  Synthetic construct
actctttgtgccttagatatcatctgtgaaacagctatggggaagaatat

SEQ ID NO: 2454 - DNA, 50 bp, Artificial sequence
  Synthetic construct
cgtgaatcatctcaagaaggcagtacctccgataaaaccatcctttctcg

SEQ ID NO: 2455 - DNA, 50 bp, Artificial sequence
  Synthetic construct
tctatcaacagagaaagttacgcaaagaaaatgagtcaaaagtctcaaaa

SEQ ID NO: 2456 - DNA, 50 bp, Artificial sequence
  Synthetic construct
aagcaatgtgagtgtcatctatccaaacatctatgcagcaaacccagtga

SEQ ID NO: 2457 - DNA, 50 bp, Artificial sequence
  Synthetic construct
gagaacttgaaactgcgtaaacaaaataacggtgcttttaatgaaacgct

SEQ ID NO: 2458 - DNA, 50 bp, Artificial sequence
  Synthetic construct
tttgatcctcaaagcttgtgtggtctgccatccctctgattctttggaca

SEQ ID NO: 2459 - DNA, 50 bp, Artificial sequence
  Synthetic construct
cactcttttgttcaatataagcagagaccttccaccgggggcaggatttg

SEQ ID NO: 2460 - DNA, 50 bp, Artificial sequence
  Synthetic construct
tcctcacttcagataaaagaagaaccaatattctgaaaaatacacaacag

SEQ ID NO: 2461 - DNA, 50 bp, Artificial sequence
  Synthetic construct
tcctatgaaccttcttatttcaacatcctcaatcctgttatgggtgtatg

SEQ ID NO: 2462 - DNA, 50 bp, Artificial sequence
  Synthetic construct
tgtataaagaggccacgtctaccttcaccaatatcacgtaccggggcact

SEQ ID NO: 2463 - DNA, 50 bp, Artificial sequence
  Synthetic construct
aggaggaaatagggaatagttcactttattcaaagttggaggaaagcact

SEQ ID NO: 2464 - DNA, 50 bp, Artificial sequence
  Synthetic construct
atcgctgatgcctgtgacctcaccatcgacgagatggagagtgcagccag

SEQ ID NO: 2465 - DNA, 50 bp, Artificial sequence
  Synthetic construct
caacggtgtgcaatgggcgggaagtcctcgactccaccacctcatctctg

SEQ ID NO: 2466 - DNA, 50 bp, Artificial sequence
  Synthetic construct
catgtggacgaggaggactgcctgggggtgcagagggaggaccgccgggg

SEQ ID NO: 2467 - DNA, 50 bp, Artificial sequence
  Synthetic construct
ctgaatctagaagtcagagttcacaacaatttacaagatggaacagaagt

SEQ ID NO: 2468 - DNA, 50 bp, Artificial sequence
  Synthetic construct
tcccgaatccaggcatcacccaccctcgaacccgagacagcagccccacc

SEQ ID NO: 2469 - DNA, 50 bp, Artificial sequence
  Synthetic construct
gtcagcagattcctgtgttcaagctcagtggggaaaacggtgatgaagtg

SEQ ID NO: 2470 - DNA, 50 bp, Artificial sequence
  Synthetic construct
gtcctggagatgatccgctgccacaacttggtggacgttttctttgctgc

SEQ ID NO: 2471 - DNA, 50 bp, Artificial sequence
  Synthetic construct
aatatgtttccatcacacaatttgttacttcactgaatttcttcaaaacc

SEQ ID NO: 2472 - DNA, 50 bp, Artificial sequence
  Synthetic construct
caagacctcccccaactccacctcattgcccgattgtctcaggcacagca

SEQ ID NO: 2473 - DNA, 50 bp, Artificial sequence
  Synthetic construct
gcctgaatacataaaccagtccgttcccaaaaggcccgctggctctgtgc

SEQ ID NO: 2474 - DNA, 50 bp, Artificial sequence
  Synthetic construct
cattgttcgtcgcttcaaccttatagatgatagttctggtaatttagcat

SEQ ID NO: 2475 - DNA, 50 bp, Artificial sequence
  Synthetic construct
cgtctttgcttttctgtatttactcagtgatttgctgatggaaatgaaca

SEQ ID NO: 2476 - DNA, 50 bp, Artificial sequence
  Synthetic construct
agaggttatgaggttatttttaatgaaaaaagggtgttttccctctatat

SEQ ID NO: 2477 - DNA, 50 bp, Artificial sequence
  Synthetic construct
cagcgtcgcccccgtgaccctgaggtcgtcaatgatgagtcctctctggt

SEQ ID NO: 2478 - DNA, 50 bp, Artificial sequence
  Synthetic construct
gagcatgtgaacttttatgttgaatatggtgtagcaggcagcaaagaaga

SEQ ID NO: 2479 - DNA, 50 bp, Artificial sequence
  Synthetic construct
gatgccaaactcaagagtgacgggaccatcgcagccatcacagagaagga

SEQ ID NO: 2480 - DNA, 50 bp, Artificial sequence
  Synthetic construct
gtgaatggacatatgcgcttcagagatgttattctggtgttttctgcaat

SEQ ID NO: 2481 - DNA, 50 bp, Artificial sequence
  Synthetic construct
gagagacaaatatggggttttccctcttagaggaaaaatactcaatgttc

SEQ ID NO: 2482 - DNA, 50 bp, Artificial sequence
  Synthetic construct
acggaggattaccggctgcgactcatctccctcaagagtgggactgagga

SEQ ID NO: 2483 - DNA, 50 bp, Artificial sequence
  Synthetic construct
tttccctgaaagtttgggaatgactcttccagaaaccttagagcagatgc

SEQ ID NO: 2484 - DNA, 50 bp, Artificial sequence
  Synthetic construct
tttttattccataaacgttggtggattttttaagttacggtctggagagg

SEQ ID NO: 2485 - DNA, 50 bp, Artificial sequence
  Synthetic construct
tccttgattcatcttgtgttacttctacctttacccttctgtaggcccca

SEQ ID NO: 2486 - DNA, 50 bp, Artificial sequence
  Synthetic construct
atgcgcttgaacatcatcagccctgacctgtctggttgcacaagcaaagg

SEQ ID NO: 2487 - DNA, 50 bp, Artificial sequence
  Synthetic construct
ctcctgcttccctggctcatgttgctcacaggcagagtgtctctggcaca

SEQ ID NO: 2488 - DNA, 50 bp, Artificial sequence
  Synthetic construct
tggctgaggagctggaagccccccggcccgaagaggaaggctcaggtcac

SEQ ID NO: 2489 - DNA, 50 bp, Artificial sequence
  Synthetic construct
ccgacaccccgtgcagaggggcaccctcctacgcacaccatctccaccat

SEQ ID NO: 2490 - DNA, 50 bp, Artificial sequence
  Synthetic construct
atttttatgtctttgttggtgggcatcacttcaggcatgtggatttggtc

SEQ ID NO: 2491 - DNA, 50 bp, Artificial sequence
  Synthetic construct
acacttaccagcctctatgcactatataataactgggagcacatgaaagg

SEQ ID NO: 2492 - DNA, 50 bp, Artificial sequence
  Synthetic construct
ggttctccagccatttttgttgctttgtgggctattgccagacactttct

SEQ ID NO: 2493 - DNA, 50 bp, Artificial sequence
  Synthetic construct
caagaagtccctcctaagccatgagttccaggatgaaacagacactgaag

SEQ ID NO: 2494 - DNA, 50 bp, Artificial sequence
  Synthetic construct
aaaggagtagttctatgacttcaacaatgacaataggcaagtttatgcta

SEQ ID NO: 2495 - DNA, 50 bp, Artificial sequence
  Synthetic construct
attttgtcttttttcctggcatgtaagccagcgatgggaatggaggcacc

SEQ ID NO: 2496 - DNA, 50 bp, Artificial sequence
  Synthetic construct
ctcccacttcactgaccagtgccactactgaccatctagcaccagccaca

SEQ ID NO: 2497 - DNA, 50 bp, Artificial sequence
  Synthetic construct
tgcaccgcgaggagcagggcagtcaccgtggagagtaccccccggaccag

SEQ ID NO: 2498 - DNA, 50 bp, Artificial sequence
  Synthetic construct
ttcccgcatcatctttcctgtgctctttgccatattcaatctggtctatt

SEQ ID NO: 2499 - DNA, 50 bp, Artificial sequence
  Synthetic construct
tgtacaaggagaagtcaggagccgtgagaaaccggaagcagcagccccct

SEQ ID NO: 2500 - DNA, 50 bp, Artificial sequence
  Synthetic construct
ctggtctcagtgtcagtgataatgaatctggtcaaggcagccaggagggg

SEQ ID NO: 2501 - DNA, 50 bp, Artificial sequence
  Synthetic construct
tcactcatgtacctcagctaccttgtgctcttctgccatttcttctttga

SEQ ID NO: 2502 - DNA, 50 bp, Artificial sequence
  Synthetic construct
atgccttgaattctactaattttgatgagaagccagtcatcattgccagc

SEQ ID NO: 2503 - DNA, 50 bp, Artificial sequence
  Synthetic construct
ccgagactgagggccaacccctccagcttttcagccctagcaaccccccg

SEQ ID NO: 2504 - DNA, 50 bp, Artificial sequence
  Synthetic construct
ccgagacagttcatcctcccctaagcaagaggacagtggtggtagcagca

SEQ ID NO: 2505 - DNA, 50 bp, Artificial sequence
  Synthetic construct
gtgtcaggccacatcagtgactccatccctggacttaagaagatctactt

SEQ ID NO: 2506 - DNA, 50 bp, Artificial sequence
  Synthetic construct
aatagtcatgaatatgaacaagtctacacgggctcactatctgaagaaaa

SEQ ID NO: 2507 - DNA, 50 bp, Artificial sequence
  Synthetic construct
aatattgtcgagggaactgaaaaacaatctcacagtcaatctacttcact

SEQ ID NO: 2508 - DNA, 50 bp, Artificial sequence
  Synthetic construct
cacggaccatccggtcaccagaagtgaaaaggctgcctcctttaaactgc

SEQ ID NO: 2509 - DNA, 50 bp, Artificial sequence
  Synthetic construct
caaagtttatcccagtttggaattacagaagtctctcctgagaaaaatgt

SEQ ID NO: 2510 - DNA, 50 bp, Artificial sequence
  Synthetic construct
atgagagtgcctacattgtggcaggtaagcaattattattatttcctatt

SEQ ID NO: 2511 - DNA, 50 bp, Artificial sequence
  Synthetic construct
ttaagttattctaatgtttttaaagctagagagtctgaaaagagggaaga

SEQ ID NO: 2512 - DNA, 50 bp, Artificial sequence
  Synthetic construct
cttgaaatctctcaaacgttgttgggaataattgtggtaaatacactttt

SEQ ID NO: 2513 - DNA, 50 bp, Artificial sequence
  Synthetic construct
tttgttttggttttcttcctcacaaattcttttcggtctgtctttccagc

SEQ ID NO: 2514 - DNA, 50 bp, Artificial sequence
  Synthetic construct
taatccaggtggacgaagacatcccagcagcaacatccgcagcagcaaca

SEQ ID NO: 2515 - DNA, 50 bp, Artificial sequence
  Synthetic construct
gcacattaaaaaacagcctcttcccatcgcctattagctccatctctcct

SEQ ID NO: 2516 - DNA, 50 bp, Artificial sequence
  Synthetic construct
tgctggccctaagttgtaccccaaactctacacagacatccacacacaca

SEQ ID NO: 2517 - DNA, 50 bp, Artificial sequence
  Synthetic construct
ctccgtccgtgcccctcaaccacctgcctgggatgcccgacacccacctg

SEQ ID NO: 2518 - DNA, 50 bp, Artificial sequence
  Synthetic construct
gagcaattctcacctgttgtcttatatccatctaggaatccccatctcta

SEQ ID NO: 2519 - DNA, 50 bp, Artificial sequence
  Synthetic construct
ccaagacgatggagtattgcccccttatgatgtgaaccaactgcttggct

SEQ ID NO: 2520 - DNA, 50 bp, Artificial sequence
  Synthetic construct
ctactacctgtcccctctgaaactggagcacttggctcttatctactttg

SEQ ID NO: 2521 - DNA, 50 bp, Artificial sequence
  Synthetic construct
atttgattccgatggagatggaagatactcattcctggagctaagggtag

SEQ ID NO: 2522 - DNA, 50 bp, Artificial sequence
  Synthetic construct
ggctgttacacggtgatcctcaacaccttcgagacctacgtctacttggc

SEQ ID NO: 2523 - DNA, 50 bp, Artificial sequence
  Synthetic construct
atgcctgcggcggagactgcatcaggctctcgcgtctgcttctacgcttt

SEQ ID NO: 2524 - DNA, 50 bp, Artificial sequence
  Synthetic construct
agcccggaagttacagtgatgcaccggaatatctgtggtctggaactctt

SEQ ID NO: 2525 - DNA, 50 bp, Artificial sequence
  Synthetic construct
actcccactctctgtcttccttcacacagtgtccccaggattccgccctc

SEQ ID NO: 2526 - DNA, 50 bp, Artificial sequence
  Synthetic construct
cccttgctgttagataagcccaatgcccaatttgattccaccgctccccg

SEQ ID NO: 2527 - DNA, 50 bp, Artificial sequence
  Synthetic construct
tggtcttggtgctccaggtcgtgcagtggaagtctgaagccaccccatac

SEQ ID NO: 2528 - DNA, 50 bp, Artificial sequence
  Synthetic construct
cactgccactcccactgccactgctactgccactgccactgctatgcagg

SEQ ID NO: 2529 - DNA, 50 bp, Artificial sequence
  Synthetic construct
cctgcccagccaggacaacgtgtcgctgaccagcaccgagacgccacccc

SEQ ID NO: 2530 - DNA, 50 bp, Artificial sequence
  Synthetic construct
gggtgcacttcgccctcctgcccgagcgctacgagccactggaggagccg

SEQ ID NO: 2531 - DNA, 50 bp, Artificial sequence
  Synthetic construct
ccgtcgaggtcagtcatcgttacccgcagcggcgccattttgcccaaacc

SEQ ID NO: 2532 - DNA, 50 bp, Artificial sequence
  Synthetic construct
aagcaaggggaacaaagaaatcctgatcttgggaatatctgcctttatct

SEQ ID NO: 2533 - DNA, 50 bp, Artificial sequence
  Synthetic construct
gttagcatttcttgtttagaacttagtaacaatctagagaagaagcccag

SEQ ID NO: 2534 - DNA, 50 bp, Artificial sequence
  Synthetic construct
tacgaagtatgatccaactcacttcatcctaaacacagcttctctcctga

SEQ ID NO: 2535 - DNA, 50 bp, Artificial sequence
  Synthetic construct
ctccctggagcagagacagagcgacccatacctggcccaggccccggccc

SEQ ID NO: 2536 - DNA, 50 bp, Artificial sequence
  Synthetic construct
agccacctacacaaccctcagcacaccttgcacgggaccacagccccagc

SEQ ID NO: 2537 - DNA, 50 bp, Artificial sequence
  Synthetic construct
gtgcccatctgtaactctctggctatcatcttcacactgattgttgggaa

SEQ ID NO: 2538 - DNA, 50 bp, Artificial sequence
  Synthetic construct
caggcagtgctcaggagtcttggtttctttgtcttacagccctttgtttt

SEQ ID NO: 2539 - DNA, 50 bp, Artificial sequence
  Synthetic construct
agaaggcccatcgctcgaaaaagatcctctctctctgcaacacctttgga

SEQ ID NO: 2540 - DNA, 50 bp, Artificial sequence
  Synthetic construct
agcctgtattacttcaatcgcaagaccttctcctttgtcatgccatcatt

SEQ ID NO: 2541 - DNA, 50 bp, Artificial sequence
  Synthetic construct
ttttttacaagccttccacttcaatttccatctttaagaagaaactcaag

SEQ ID NO: 2542 - DNA, 50 bp, Artificial sequence
  Synthetic construct
cttgataaaatgtacaaagctagggtaggaagtagcaaggtgacagcagt

SEQ ID NO: 2543 - DNA, 50 bp, Artificial sequence
  Synthetic construct
gcctggaagctacgtctatgtattcgatggttaccgcatggaagaggcaa

SEQ ID NO: 2544 - DNA, 50 bp, Artificial sequence
  Synthetic construct
tctgctttgacaagacaggcaccttaacaagggacggcttggacctctgg

SEQ ID NO: 2545 - DNA, 50 bp, Artificial sequence
  Synthetic construct
tccgcaccaccatcctgttcctcaaattagccctcttctcggcacactgc

SEQ ID NO: 2546 - DNA, 50 bp, Artificial sequence
  Synthetic construct
aaaaaccgatttcaccttcttcatgattcagaatgctggaatgttaactg

SEQ ID NO: 2547 - DNA, 50 bp, Artificial sequence
  Synthetic construct
cggaaggtctcgaacatctggacgaagcgcagcctctctgtcaacggcat

SEQ ID NO: 2548 - DNA, 50 bp, Artificial sequence
  Synthetic construct
ttcattatgattaccagaccctgaggattgggggactggtgttcgctgtg

SEQ ID NO: 2549 - DNA, 50 bp, Artificial sequence
  Synthetic construct
tgagaaagtgcccaaggcccgtctctcagccaccttcggcttcaacccct

SEQ ID NO: 2550 - DNA, 50 bp, Artificial sequence
  Synthetic construct
agcatgtgacgccagtcccgagtccacgccactgacaggacagctccccg

SEQ ID NO: 2551 - DNA, 50 bp, Artificial sequence
  Synthetic construct
tttccagggactatgttcggagtgaactggagtttgcctatgagggacca

SEQ ID NO: 2552 - DNA, 50 bp, Artificial sequence
  Synthetic construct
tcagcgcaaagaacctcccgacagtgccactgaccccacctccccccagc

SEQ ID NO: 2553 - DNA, 50 bp, Artificial sequence
  Synthetic construct
tacgatgtgtccgtgaccctcagagatcctttgccctgggaatccagtgg

SEQ ID NO: 2554 - DNA, 50 bp, Artificial sequence
  Synthetic construct
gtctcactcatcctcaacaacgtggcggccttcacctccaactgggtgtg

SEQ ID NO: 2555 - DNA, 50 bp, Artificial sequence
  Synthetic construct
tgaattgggtgataagacattttttatagcagccatcatggcaatgcgct

SEQ ID NO: 2556 - DNA, 50 bp, Artificial sequence
  Synthetic construct
ggaagttaatgcgccgaggcaacccctatataacattcaggtcagaaagg

SEQ ID NO: 2557 - DNA, 50 bp, Artificial sequence
  Synthetic construct
agtgttcaaagaatatgctgggagcatgggtgagagctgtggtgggctgt

SEQ ID NO: 2558 - DNA, 50 bp, Artificial sequence
  Synthetic construct
catcctcatctccgcctgcatcttcatcctcgtcgggatcgttcactacc

SEQ ID NO: 2559 - DNA, 50 bp, Artificial sequence
  Synthetic construct
taaacaagcgacactctagtggtgatgggaatagtaaattaaaaagtgag

SEQ ID NO: 2560 - DNA, 50 bp, Artificial sequence
  Synthetic construct
tctgtccacatcgccattgctcagaatacagacgcccaggctgtgctgaa

SEQ ID NO: 2561 - DNA, 50 bp, Artificial sequence
  Synthetic construct
cgcggaggctacgaatactcggaccagaagtcgggaaagtcaaaggggaa

SEQ ID NO: 2562 - DNA, 50 bp, Artificial sequence
  Synthetic construct
ccaaagagtcaggaatgcttgggagagttaatcttggtctatctggtgtg

SEQ ID NO: 2563 - DNA, 50 bp, Artificial sequence
  Synthetic construct
cccctggcctgctgagcagtccccaaaatcacgcacgtccgaggagatgg

SEQ ID NO: 2564 - DNA, 50 bp, Artificial sequence
  Synthetic construct
aggacgcccctggagccggaaccccagcagaagccggaaccagaaccaaa

SEQ ID NO: 2565 - DNA, 50 bp, Artificial sequence
  Synthetic construct
cttatagttactatcattatggccggaagactgttcaggtgataaaagac

SEQ ID NO: 2566 - DNA, 50 bp, Artificial sequence
  Synthetic construct
atagaagcatggaattgaaaaatagcctcagactggatggacttggatca

SEQ ID NO: 2567 - DNA, 50 bp, Artificial sequence
  Synthetic construct
ggcctgtgccagctcacctcttccctccccatctgttttctccggcagcg

SEQ ID NO: 2568 - DNA, 50 bp, Artificial sequence
  Synthetic construct
cttttgattttagtaggactcggaacattcaagatggtagtgagggcaca

SEQ ID NO: 2569 - DNA, 50 bp, Artificial sequence
  Synthetic construct
catagtgaacattctgggtcaagagcagttcatggcagtgtacctatctg

SEQ ID NO: 2570 - DNA, 50 bp, Artificial sequence
  Synthetic construct
gatcctgtcgcagatcgtcctcatgcagaccgtgtattacggctcgctgg

SEQ ID NO: 2571 - DNA, 50 bp, Artificial sequence
  Synthetic construct
gatcgggatttatttctattggtccaaatgttcccgtgaggtcctttggc

SEQ ID NO: 2572 - DNA, 50 bp, Artificial sequence
  Synthetic construct
ggcgcagcggagcacggagaccgccttgtaccggaaaatgctgggcaacc

SEQ ID NO: 2573 - DNA, 50 bp, Artificial sequence
  Synthetic construct
gtgggtagccagcatcctgtcctccatcctcgacaccatcttccacaagg

SEQ ID NO: 2574 - DNA, 50 bp, Artificial sequence
  Synthetic construct
gcctgaagacagtgtgtgcggcaagaacgcaagggggcaagtcccagaag

SEQ ID NO: 2575 - DNA, 50 bp, Artificial sequence
  Synthetic construct
acccctttgtctactacttctcctcctccgggttccaagccgactttcat

SEQ ID NO: 2576 - DNA, 50 bp, Artificial sequence
  Synthetic construct
ccacaaccattttggaccccggaccacccactctacttcccttcctcatc

SEQ ID NO: 2577 - DNA, 50 bp, Artificial sequence
  Synthetic construct
gcaaaggaggaatctctcttccccgtgccacccagcaaggagaccagtgc

SEQ ID NO: 2578 - DNA, 50 bp, Artificial sequence
  Synthetic construct
ctgtgccccttccacgggctgggacatgccttggattctgatgctgctgc

SEQ ID NO: 2579 - DNA, 50 bp, Artificial sequence
  Synthetic construct
gctgcgagcaggacctgtgcaacatagccgcttccccacagcagctcacc

SEQ ID NO: 2580 - DNA, 50 bp, Artificial sequence
  Synthetic construct
gagccccagaggccagtaaaggaggaagagcccaagattccaggggacct

SEQ ID NO: 2581 - DNA, 50 bp, Artificial sequence
  Synthetic construct
cctgtgccgaatgaagaacacgaccaagaagccagacttcagcagccagc

SEQ ID NO: 2582 - DNA, 50 bp, Artificial sequence
  Synthetic construct
cccaagaacccgaaaacttcccagtatttcttccagttgcaggagcattt

SEQ ID NO: 2583 - DNA, 50 bp, Artificial sequence
  Synthetic construct
aagaggcggagggccgctgacgtggaaccatcatcacccgaacccaagag

SEQ ID NO: 2584 - DNA, 50 bp, Artificial sequence
  Synthetic construct
cccaaagaactttaatcctggacttctctcttcctgtgttctggcttgcg

SEQ ID NO: 2585 - DNA, 50 bp, Artificial sequence
  Synthetic construct
caaaattcttcatcaagcaaacttactcagccaagactcgtggtatctgc

SEQ ID NO: 2586 - DNA, 50 bp, Artificial sequence
  Synthetic construct
ttatcctctggacagtttacctttggactatcttgtggtctcgaaatgga

SEQ ID NO: 2587 - DNA, 50 bp, Artificial sequence
  Synthetic construct
cgctgttccacgagttcctgcgccacgacccgcacttcgacgacacgccg

SEQ ID NO: 2588 - DNA, 50 bp, Artificial sequence
  Synthetic construct
accacctctctggtcaacttcttcatgacactgtggatcagccgcgacac

SEQ ID NO: 2589 - DNA, 50 bp, Artificial sequence
  Synthetic construct
ctcttactctaagatagtttcctccatacgtgcaatctcatcagctcagg

SEQ ID NO: 2590 - DNA, 50 bp, Artificial sequence
  Synthetic construct
ctggtgctcggtacggcagaagggttcctatctgacccacgaagccagtg

SEQ ID NO: 2591 - DNA, 50 bp, Artificial sequence
  Synthetic construct
aagaatgtggaaatctttaattttttctgtgagccatctcaacttctcaa

SEQ ID NO: 2592 - DNA, 50 bp, Artificial sequence
  Synthetic construct
ggcagatagagcttcgttctgaagattctccagatattttgacatattct

SEQ ID NO: 2593 - DNA, 50 bp, Artificial sequence
  Synthetic construct
attgtctcctccttaatgggaatgtcctccaccaagggcaagtacaaagc

SEQ ID NO: 2594 - DNA, 50 bp, Artificial sequence
  Synthetic construct
cctacattccaatttttccccagttatacttccacatgatacaccagaga

SEQ ID NO: 2595 - DNA, 50 bp, Artificial sequence
  Synthetic construct
ctgcgttttcacacagagaaaaatcactcgcccttctcagaggcccaaga

SEQ ID NO: 2596 - DNA, 50 bp, Artificial sequence
  Synthetic construct
ctaccgtctggagattgtcagtgatggaaaatacggagcccgagaccctg

SEQ ID NO: 2597 - DNA, 50 bp, Artificial sequence
  Synthetic construct
atgagcagggggctttgaaactgactgtcggccagtgcgatggggccacg

SEQ ID NO: 2598 - DNA, 50 bp, Artificial sequence
  Synthetic construct
ctatggaggcaattctccttctgctctacgaagccggtacatagatagtg

SEQ ID NO: 2599 - DNA, 50 bp, Artificial sequence
  Synthetic construct
gggggtgctgacatgcccgtcgttatcactgtgctgaacagctactcagg

SEQ ID NO: 2600 - DNA, 50 bp, Artificial sequence
  Synthetic construct
tggaacaatcaccaaccaacatacacactacactcaaagatcacatggat

SEQ ID NO: 2601 - DNA, 50 bp, Artificial sequence
  Synthetic construct
agaatggtgctgcccatgccaaggctacatcaagactgtgcgctgaggat

SEQ ID NO: 2602 - DNA, 50 bp, Artificial sequence
  Synthetic construct
gctctctcgcagccactggggatcgtgggtaagttctctttcagactttg

SEQ ID NO: 2603 - DNA, 50 bp, Artificial sequence
  Synthetic construct
agcagaagcgtcccgcgaggcccgcgccaaggttattgcagccgaaggag

SEQ ID NO: 2604 - DNA, 50 bp, Artificial sequence
  Synthetic construct
attctggatgtatgtgacgtggttcttctggttttggaatgatatccttt

SEQ ID NO: 2605 - DNA, 50 bp, Artificial sequence
  Synthetic construct
aggtgagtgatgtgggcttctccacaccgagcatccagcctggacacctc

SEQ ID NO: 2606 - DNA, 50 bp, Artificial sequence
  Synthetic construct
accctaagaataagcactgtgtgtttcaaggtgacctcctgctcttcagc

SEQ ID NO: 2607 - DNA, 50 bp, Artificial sequence
  Synthetic construct
acagcagcctctgctcagggtctgagactgggaaagcagtcggccaagat

SEQ ID NO: 2608 - DNA, 50 bp, Artificial sequence
  Synthetic construct
gtctgcttggagagatcacctacattgtgctgctggtgcttcatactgtc

SEQ ID NO: 2609 - DNA, 50 bp, Artificial sequence
  Synthetic construct
ggcctaccgttgccttcagtggcccgcattcttccaccagccaccaccct

SEQ ID NO: 2610 - DNA, 50 bp, Artificial sequence
  Synthetic construct
ggaagacttcagatgccctttctaaggcacaaaatgatgtgatggaaatg

SEQ ID NO: 2611 - DNA, 50 bp, Artificial sequence
  Synthetic construct
ttccgcctgcgacagttccagaatttgctctcccactcagtgtgctctgc

SEQ ID NO: 2612 - DNA, 50 bp, Artificial sequence
  Synthetic construct
acctgggaatgggagaccagaaggtttcgagccggggcacccgcctagtg

SEQ ID NO: 2613 - DNA, 50 bp, Artificial sequence
  Synthetic construct
caactggggccgggttgtcgcccttttctactttgccagcaaactggtgc

SEQ ID NO: 2614 - DNA, 50 bp, Artificial sequence
  Synthetic construct
atcgtgtgctctgtgaaccatgaatctctaaagggagctgacagatccac

SEQ ID NO: 2615 - DNA, 50 bp, Artificial sequence
  Synthetic construct
atcctactgacttcactccagacccatttagaaggcatgatagtataact

SEQ ID NO: 2616 - DNA, 50 bp, Artificial sequence
  Synthetic construct
aaacacttgatgcttttgcattatgagatttttgtttttctattgttgtg

SEQ ID NO: 2617 - DNA, 50 bp, Artificial sequence
  Synthetic construct
gtccctgccactccactgaagccactcttgtcaccagcaacttccatgtc

SEQ ID NO: 2618 - DNA, 50 bp, Artificial sequence
  Synthetic construct
tcctgactggaagatttggtctaactttagccccacatccatttaatata

SEQ ID NO: 2619 - DNA, 50 bp, Artificial sequence
  Synthetic construct
tcaggctttgggagtgagcagctagacaccaatgacgagagtgatgttag

SEQ ID NO: 2620 - DNA, 50 bp, Artificial sequence
  Synthetic construct
cagtagtttatcaaaaattgcattagcagccatagctgcctttatgtctg

SEQ ID NO: 2621 - DNA, 50 bp, Artificial sequence
  Synthetic construct
attaatgatacttgcattttgcatcatcttgactggagccttatgcactg

SEQ ID NO: 2622 - DNA, 50 bp, Artificial sequence
  Synthetic construct
taactttggatgatgaccttgatgtggttcggagagaccagatccctgtc

SEQ ID NO: 2623 - DNA, 50 bp, Artificial sequence
  Synthetic construct
acacaaccacccgacctgttcccgacacctcccggctgcctggggccacc

SEQ ID NO: 2624 - DNA, 50 bp, Artificial sequence
  Synthetic construct
acccaccctcggagccctgtggcacgccctgccgtctggctactctttgt

SEQ ID NO: 2625 - DNA, 50 bp, Artificial sequence
  Synthetic construct
tatacggggtcaggtcaaaggaacactggggtggagggttgggattgctg

SEQ ID NO: 2626 - DNA, 50 bp, Artificial sequence
  Synthetic construct
caggaagagtgagactgaggacccccaagtgttccatccctaaggaaagc

SEQ ID NO: 2627 - DNA, 50 bp, Artificial sequence
  Synthetic construct
cttttctgtgaaacacttggcaatttctacattttagggacccttatgat

SEQ ID NO: 2628 - DNA, 50 bp, Artificial sequence
  Synthetic construct
aagaatgtccaaggaattgtacctcgatcttaccattggcctttcccctg

SEQ ID NO: 2629 - DNA, 50 bp, Artificial sequence
  Synthetic construct
tctattgcattcattgtactgtttgcagctttgatgagcttcctcacagg

SEQ ID NO: 2630 - DNA, 50 bp, Artificial sequence
  Synthetic construct
tgggattacaggggtgagccactgtgtccggcaaaccattgctattttaa

SEQ ID NO: 2631 - DNA, 50 bp, Artificial sequence
  Synthetic construct
agtcgagtcaccatgtcagtagacacgtccaagaaccagttctccctgaa

SEQ ID NO: 2632 - DNA, 50 bp, Artificial sequence
  Synthetic construct
gccaagtcttacaagggcagttgaaaatatacaaattaatgaagaggata

SEQ ID NO: 2633 - DNA, 50 bp, Artificial sequence
  Synthetic construct
cagtgagcatcaccagttttatcccacgttttaactttctaagcatagat

SEQ ID NO: 2634 - DNA, 50 bp, Artificial sequence
  Synthetic construct
tggttctgggttgcctcatccctctcatcctgtcagtaggacaccagcat

SEQ ID NO: 2635 - DNA, 50 bp, Artificial sequence
  Synthetic construct
tgatgcccttcttcgtgatgggattacaggtcggaatgtacggattgttt

SEQ ID NO: 2636 - DNA, 50 bp, Artificial sequence
  Synthetic construct
gacggagagatataaaggtcccagcggcaccaacatcatcattggctcca

SEQ ID NO: 2637 - DNA, 50 bp, Artificial sequence
  Synthetic construct
tcagaagctgcgtcccaacatccccaactggtggcagagttatgaggcac

SEQ ID NO: 2638 - DNA, 50 bp, Artificial sequence
  Synthetic construct
cgtagcctgtcaccgacacctgcactcagtcacgcactactacatcgtca

SEQ ID NO: 2639 - DNA, 50 bp, Artificial sequence
  Synthetic construct
cgatctcctgagcgtcagtttcgagggaccccgcccggacagcagcgcag

SEQ ID NO: 2640 - DNA, 50 bp, Artificial sequence
  Synthetic construct
cgtgttcgtgacttcgctggccgcagccgacctggtgatgggactcctgg

SEQ ID NO: 2641 - DNA, 50 bp, Artificial sequence
  Synthetic construct
cgaagacactcagccggagttgtaccacccaatgaaaaaaggatctggag

SEQ ID NO: 2642 - DNA, 50 bp, Artificial sequence
  Synthetic construct
cgtgtttacatcagtggttggagaccagacctaacagacaggtgtgtcct

SEQ ID NO: 2643 - DNA, 50 bp, Artificial sequence
  Synthetic construct
ctgcccagaagactgtacttcaattcctgcccctaccatcctcccctgta

SEQ ID NO: 2644 - DNA, 50 bp, Artificial sequence
  Synthetic construct
tcgaagcccaacaaacagtacgggtatgtggaaggactcgcctaaatctt

SEQ ID NO: 2645 - DNA, 50 bp, Artificial sequence
  Synthetic construct
ggattgccctgatggtgttcgtggcacctaccctgggtatcgccgcctgc

SEQ ID NO: 2646 - DNA, 50 bp, Artificial sequence
  Synthetic construct
gggtacaggacacaggtgggcgagcggggactgaagctgagcggcgggga

SEQ ID NO: 2647 - DNA, 50 bp, Artificial sequence
  Synthetic construct
gtagatgaaagccagaggatcagtttcccgcgactggtggctgacaggtg

SEQ ID NO: 2648 - DNA, 50 bp, Artificial sequence
  Synthetic construct
aacatcccgctcattgacgacacggacgtggacgagaacgaggagcgcct

SEQ ID NO: 2649 - DNA, 50 bp, Artificial sequence
  Synthetic construct
gggcagagtggtgacgctcgtgaccttcgcagggacgctgctggagagag

SEQ ID NO: 2650 - DNA, 50 bp, Artificial sequence
  Synthetic construct
gacattacaacaggtgccctaatgacagcaagacccctagaccgggaaga

SEQ ID NO: 2651 - DNA, 50 bp, Artificial sequence
  Synthetic construct
cggcatctactccacgcagaagaactcctcggagcagttcgagaagtggc

SEQ ID NO: 2652 - DNA, 50 bp, Artificial sequence
  Synthetic construct
taccaggacaccacatatataaaccatgtcgtttctgtggctgggtgggg

SEQ ID NO: 2653 - DNA, 50 bp, Artificial sequence
  Synthetic construct
cctgtggtagcaccttatcctcaggatggtttggaaatgaagcccctcag

SEQ ID NO: 2654 - DNA, 50 bp, Artificial sequence
  Synthetic construct
actggggacctctcttacggttaccaggggcacgaccagttcaagcggcg

SEQ ID NO: 2655 - DNA, 50 bp, Artificial sequence
  Synthetic construct
agcagcccctgtgctggacatcaccacatggaccttccccatcatggccc

SEQ ID NO: 2656 - DNA, 50 bp, Artificial sequence
  Synthetic construct
gccctgcctttttctatggtgtccgctacaataccacaaacaatggctac

SEQ ID NO: 2657 - DNA, 50 bp, Artificial sequence
  Synthetic construct
acaagtacccggacatcggccagcccgacgaccctccgccgccctacgag

SEQ ID NO: 2658 - DNA, 50 bp, Artificial sequence
  Synthetic construct
gaaaaggatatacacccctaatggagacacatttaagcagcaagagatac

SEQ ID NO: 2659 - DNA, 50 bp, Artificial sequence
  Synthetic construct
cctaagcagcagccattggaaccgggagaagccgcactccactctgactc

SEQ ID NO: 2660 - DNA, 50 bp, Artificial sequence
  Synthetic construct
ggagcagtgacccccacctctgccgagatctggtttctgggctcttcagc

SEQ ID NO: 2661 - DNA, 50 bp, Artificial sequence
  Synthetic construct
actactttttcgccgtctccaccctgaattccctgctcaaccccgtcatc

SEQ ID NO: 2662 - DNA, 50 bp, Artificial sequence
  Synthetic construct
ctccctctccaattccaaggagttctcagaacacttccgctgcccacctg

SEQ ID NO: 2663 - DNA, 50 bp, Artificial sequence
  Synthetic construct
aggctgcctacaatgcttacaaagcatggctgagaaagcatggggaggag

SEQ ID NO: 2664 - DNA, 50 bp, Artificial sequence
  Synthetic construct
gcggcagcggaggctctactgcaacgtgggcatcggctttcacctccagg

SEQ ID NO: 2665 - DNA, 50 bp, Artificial sequence
  Synthetic construct
ccagtggttccacttacatacttgtccctctaagtcatttagcccaaaac

SEQ ID NO: 2666 - DNA, 50 bp, Artificial sequence
  Synthetic construct
tcaccatgtcctaccgcagcgactccgacatcttcacgccctacggctgg

SEQ ID NO: 2667 - DNA, 50 bp, Artificial sequence
  Synthetic construct
agttcgaggcatttgacaacgcggtgcccgagctggtagactccttcctg

SEQ ID NO: 2668 - DNA, 50 bp, Artificial sequence
  Synthetic construct
actccagggcagacggctccttcagcatcatctggcaggaagcactctcc

SEQ ID NO: 2669 - DNA, 50 bp, Artificial sequence
  Synthetic construct
ctgggcaccaccttctgcaaactgcactcctccatcttctttctcaacat

SEQ ID NO: 2670 - DNA, 50 bp, Artificial sequence
  Synthetic construct
agaatccagccaagcacagtctacgtgtgcaatgaaaaccagtctgcggt

SEQ ID NO: 2671 - DNA, 50 bp, Artificial sequence
  Synthetic construct
cctgtgtctgacgacagtgacctccctgagtcggcctctagccctgccgc

SEQ ID NO: 2672 - DNA, 50 bp, Artificial sequence
  Synthetic construct
agagtgtttcatcccacaggctaaactaagcccccagcaagatgcaggag

SEQ ID NO: 2673 - DNA, 50 bp, Artificial sequence
  Synthetic construct
gcctcacactgcctggcctacgccaactcctgcctcaacccgctcgtcta

SEQ ID NO: 2674 - DNA, 50 bp, Artificial sequence
  Synthetic construct
ttaatttcctcatttttatccgcattcttggcattctcctgtccaagctg

SEQ ID NO: 2675 - DNA, 50 bp, Artificial sequence
  Synthetic construct
actgaaggccaatctcatgtgcaagacagacatcaaatgcagacttgcca

SEQ ID NO: 2676 - DNA, 50 bp, Artificial sequence
  Synthetic construct
aacgcatgaaactcacaaagaacacccaaaactttaagcctgctcctgcc

SEQ ID NO: 2677 - DNA, 50 bp, Artificial sequence
  Synthetic construct
tctgaaattagcctactgccttcagacattgacaggtataagaagagatt

SEQ ID NO: 2678 - DNA, 50 bp, Artificial sequence
  Synthetic construct
tttactggatcacatacaagatcattcggcatgaagatgtccacaagaaa

SEQ ID NO: 2679 - DNA, 50 bp, Artificial sequence
  Synthetic construct
tcaagatcatagtccgttctgggggttttattttctgcttttagctgttc

SEQ ID NO: 2680 - DNA, 50 bp, Artificial sequence
  Synthetic construct
cgacccccactacgagaagaagtactacttcccggtccgcgagctggagc

SEQ ID NO: 2681 - DNA, 50 bp, Artificial sequence
  Synthetic construct
tgggttgcacatgaaccgcgaaaggaaggccgccaaacagttgggtttta

SEQ ID NO: 2682 - DNA, 50 bp, Artificial sequence
  Synthetic construct
cgataaagggatgactgtccagcctgaacttaaagcttctttttcctatg

SEQ ID NO: 2683 - DNA, 50 bp, Artificial sequence
  Synthetic construct
tgccttggaatccacaatccttgacaacgaagactcagacaccaagaagt

SEQ ID NO: 2684 - DNA, 50 bp, Artificial sequence
  Synthetic construct
catattctgttttattttgatattgtttttaccaccattttcaccattga

SEQ ID NO: 2685 - DNA, 50 bp, Artificial sequence
  Synthetic construct
aaaaaaaaaaggacaaaataatttcagcaatttcaagtgtcattttcctg

SEQ ID NO: 2686 - DNA, 50 bp, Artificial sequence
  Synthetic construct
tgtgtgttgcaggccctggatgccagacactgaataaacgcaggaagacg

SEQ ID NO: 2687 - DNA, 50 bp, Artificial sequence
  Synthetic construct
ctggctgcctgcttgactacccctacattgaagccctcagcagcgccctg

SEQ ID NO: 2688 - DNA, 50 bp, Artificial sequence
  Synthetic construct
aggctctccggcccatctccacacgggcaccttctggctgacccggatcg

SEQ ID NO: 2689 - DNA, 50 bp, Artificial sequence
  Synthetic construct
gactaccctccatgccctccatcaggcaccaggatgtttactccactgtg

SEQ ID NO: 2690 - DNA, 50 bp, Artificial sequence
  Synthetic construct
agaattattaggaacacacatcagtggtacatgccatgaacttaaagcag

SEQ ID NO: 2691 - DNA, 50 bp, Artificial sequence
  Synthetic construct
cctgccattatgactcgaagctcttcccacccggatcgaccccctttgta

SEQ ID NO: 2692 - DNA, 50 bp, Artificial sequence
  Synthetic construct
cccctggcacgctgggacttattcctgtgtggcagaaaacattcttggta

SEQ ID NO: 2693 - DNA, 50 bp, Artificial sequence
  Synthetic construct
ctcctatacgaagagcccttcaccgctgagatctaccggcagaaagcctc

SEQ ID NO: 2694 - DNA, 50 bp, Artificial sequence
  Synthetic construct
tgaagctctttgcaattcctattctgttaatcgctgttttccttgtgttg

SEQ ID NO: 2695 - DNA, 50 bp, Artificial sequence
  Synthetic construct
agaccaaaaagcctcttctgatttatccaatctttttattatacatttat

SEQ ID NO: 2696 - DNA, 50 bp, Artificial sequence
  Synthetic construct
agagtttcaaggaaaagttcgttcgcaagacccgcgagaacccggtggta

SEQ ID NO: 2697 - DNA, 50 bp, Artificial sequence
  Synthetic construct
aggaatggcatcttggtcccgcactggagttttcctcttcacagcctctt

SEQ ID NO: 2698 - DNA, 50 bp, Artificial sequence
  Synthetic construct
acacgggtcccgaggatgccttcaacttcaacaattgggtgacgctgctg

SEQ ID NO: 2699 - DNA, 50 bp, Artificial sequence
  Synthetic construct
acttcacttttctaagacccctcagcgttcagcagcccacagctctggcg

SEQ ID NO: 2700 - DNA, 50 bp, Artificial sequence
  Synthetic construct
atgagccatacgccagaatccagcagagcagaaggcaatgccacgcagaa

SEQ ID NO: 2701 - DNA, 50 bp, Artificial sequence
  Synthetic construct
tgatagccatgtttcagctcgccgtggacctgcccgcctgtgaggccctg

SEQ ID NO: 2702 - DNA, 50 bp, Artificial sequence
  Synthetic construct
caaagacctacattctgacgtgtgagcatgatgtcctcagagacgatggc

SEQ ID NO: 2703 - DNA, 50 bp, Artificial sequence
  Synthetic construct
cataatgttgggatcttctcaattatatttgcattttcatttctatcaga

SEQ ID NO: 2704 - DNA, 50 bp, Artificial sequence
  Synthetic construct
gtttttcatttacaaaattgtcaagttagccaaaataattcttgttttct

SEQ ID NO: 2705 - DNA, 50 bp, Artificial sequence
  Synthetic construct
gtccctttccccaaggtgaaactaagatagagttttcatatttatcctgt

SEQ ID NO: 2706 - DNA, 50 bp, Artificial sequence
  Synthetic construct
ccaatttactgattgtgtggctctttctgagcatagcatacctggtgacc

SEQ ID NO: 2707 - DNA, 50 bp, Artificial sequence
  Synthetic construct
ctgcctaccaccgatgcagagcctgactcctcacccactccaagagactg

SEQ ID NO: 2708 - DNA, 50 bp, Artificial sequence
  Synthetic construct
tcctaaggaacttttacttcattaacagacttacaggttacctccgaaac

SEQ ID NO: 2709 - DNA, 50 bp, Artificial sequence
  Synthetic construct
accaagttttggaagacagtgagataccacatgccgcccagaaggtgtcg

SEQ ID NO: 2710 - DNA, 50 bp, Artificial sequence
  Synthetic construct
tgtagcctacacggtgcaggtgcgagcagacacagcgtggctgaggggtg

SEQ ID NO: 2711 - DNA, 50 bp, Artificial sequence
  Synthetic construct
taggtgaggacagttctctcattagccttttcctacaggtggttgcattc

SEQ ID NO: 2712 - DNA, 50 bp, Artificial sequence
  Synthetic construct
tgaagtcatctgttatatagagaagcctggagttgagaccctggaggatt

SEQ ID NO: 2713 - DNA, 50 bp, Artificial sequence
  Synthetic construct
gacaacagagacttggaaagtgcccagagcttaaaccgaatggagtacat

SEQ ID NO: 2714 - DNA, 50 bp, Artificial sequence
  Synthetic construct
taaggtactgccgccagcttacctggaagccacagagccagcagtgacac

SEQ ID NO: 2715 - DNA, 50 bp, Artificial sequence
  Synthetic construct
acggacccccagcgtgaacattggctgctgcatagagaacgtgcttctgc

SEQ ID NO: 2716 - DNA, 50 bp, Artificial sequence
  Synthetic construct
agatccttttatgtcaaagacaacaagtaacctgctcagctccaagcctt

SEQ ID NO: 2717 - DNA, 50 bp, Artificial sequence
  Synthetic construct
caccacacttaaggagaacataatgaggttctggagatccccgaaccccg

SEQ ID NO: 2718 - DNA, 50 bp, Artificial sequence
  Synthetic construct
tgtgttcctgatgacaactgccgctcaggccatctctggcttcttcgtgt

SEQ ID NO: 2719 - DNA, 50 bp, Artificial sequence
  Synthetic construct
acaatttcatgctatacaaagaagacagaatccacgttcccatcttccat

SEQ ID NO: 2720 - DNA, 50 bp, Artificial sequence
  Synthetic construct
gcacagagaggggaagtttaacaacactttgcacctcattggagagcacc

SEQ ID NO: 2721 - DNA, 50 bp, Artificial sequence
  Synthetic construct
actcactccccctatcagttgtcagctcccagtgaccctctggacatcgt

SEQ ID NO: 2722 - DNA, 50 bp, Artificial sequence
  Synthetic construct
ctgtcacaggaaactcttcaaatagttggccttcacccactgaaccaagc

SEQ ID NO: 2723 - DNA, 50 bp, Artificial sequence
  Synthetic construct
ggaaacccttcaaatagttggccttcacccactgaaccaagctccaaaac

SEQ ID NO: 2724 - DNA, 50 bp, Artificial sequence
  Synthetic construct
tccacacccagcttcaactacacaggccgtgacttccaacgcttctttgc

SEQ ID NO: 2725 - DNA, 50 bp, Artificial sequence
  Synthetic construct
gtttgtggggaagcctctggttcaggctctggatgcgggtgccagcctct

SEQ ID NO: 2726 - DNA, 50 bp, Artificial sequence
  Synthetic construct
cattttgttctgatgaaggaaggagaacaccagctcccccggaccctgga

SEQ ID NO: 2727 - DNA, 50 bp, Artificial sequence
  Synthetic construct
gagtcacaggtggcatttggcggcttcattctgtgtaaggaaggagaaga

SEQ ID NO: 2728 - DNA, 50 bp, Artificial sequence
  Synthetic construct
acacttggggcacctaccttttaaccacagagacgggactccagaaagac

SEQ ID NO: 2729 - DNA, 50 bp, Artificial sequence
  Synthetic construct
gaaatattatatcacactgttgcaaggactaagataagcgatgatgatga

SEQ ID NO: 2730 - DNA, 50 bp, Artificial sequence
  Synthetic construct
gcagcaatgtttatggtgaaaaatggcaacgggaccgcgtgcataatggc

SEQ ID NO: 2731 - DNA, 50 bp, Artificial sequence
  Synthetic construct
gagacattcttcccagtggggatggaacctatcaggcgtgggcatcaatt

SEQ ID NO: 2732 - DNA, 50 bp, Artificial sequence
  Synthetic construct
ttctattcccagcctgaccatttgttccgcaagttccactacctgccctt

SEQ ID NO: 2733 - DNA, 50 bp, Artificial sequence
  Synthetic construct
cctgtgttacatttagccaacaccacactttcaggtaatcctgctgttcg

SEQ ID NO: 2734 - DNA, 50 bp, Artificial sequence
  Synthetic construct
aacatgaaaggggccatcacactgaccatcctgctcggggtcttcatctt

SEQ ID NO: 2735 - DNA, 50 bp, Artificial sequence
  Synthetic construct
tgctgtaccacccacattgccaaccattcctacctaccactaagctattg

SEQ ID NO: 2736 - DNA, 50 bp, Artificial sequence
  Synthetic construct
atcaggctcttcacatagctttacactgggacgaaaatactgacgtgatt

SEQ ID NO: 2737 - DNA, 50 bp, Artificial sequence
  Synthetic construct
tctgaaaagcaatgctaagaacatggtgaccaattctgttttactaaatg

SEQ ID NO: 2738 - DNA, 50 bp, Artificial sequence
  Synthetic construct
cgtgaacaccgacatctactccaaggtgctggtgaccgccgtgtacctgg

SEQ ID NO: 2739 - DNA, 50 bp, Artificial sequence
  Synthetic construct
ctttaccatctcctatgtgtactctgccgagcttttccccaccatcctcc

SEQ ID NO: 2740 - DNA, 50 bp, Artificial sequence
  Synthetic construct
tacggaagtctccaaagggtccctgaggctaagtggcaggtccaatccca

SEQ ID NO: 2741 - DNA, 50 bp, Artificial sequence
  Synthetic construct
atgagcccccttggtcccctgctgccactagctctggcaacctcagttcc

SEQ ID NO: 2742 - DNA, 50 bp, Artificial sequence
  Synthetic construct
ccatgttggcgaccaagagtggattccttgtgttgaaaacctcagtggct

SEQ ID NO: 2743 - DNA, 50 bp, Artificial sequence
  Synthetic construct
actctcttaataagaccaatggtggctgttccacagagaagtctaggaaa

SEQ ID NO: 2744 - DNA, 50 bp, Artificial sequence
  Synthetic construct
gcatcaagtactcgctgccctggaccacgctggacgagttcccgctgacg

SEQ ID NO: 2745 - DNA, 50 bp, Artificial sequence
  Synthetic construct
ctcaggagttgtttgaaatatcgaggccacagtccccagaatcagagaga

SEQ ID NO: 2746 - DNA, 50 bp, Artificial sequence
  Synthetic construct
agaattactatttcaaagaaaaccaagttggtcactttaagcaactattt

SEQ ID NO: 2747 - DNA, 50 bp, Artificial sequence
  Synthetic construct
atttctacataatttatttcaccatgttgcttgtccaccgagaagctcgt

SEQ ID NO: 2748 - DNA, 50 bp, Artificial sequence
  Synthetic construct
ggatatcaaagtgacagaatcggagatcaaaaggcggagtcacctacagc

SEQ ID NO: 2749 - DNA, 50 bp, Artificial sequence
  Synthetic construct
ttttttcacaagattttcattagacctcttaggtacaggagccggtgcag

SEQ ID NO: 2750 - DNA, 50 bp, Artificial sequence
  Synthetic construct
cggcctccaccttctttggcggctctcggagcagcggctcggcacgcaga

SEQ ID NO: 2751 - DNA, 50 bp, Artificial sequence
  Synthetic construct
tcctttcccgccatgtcttcatcacatccacaacttccactaacacttgc

SEQ ID NO: 2752 - DNA, 50 bp, Artificial sequence
  Synthetic construct
aagcatgagtcaagacactgaagttagaagtcgggtcgtggggggaagtc

SEQ ID NO: 2753 - DNA, 50 bp, Artificial sequence
  Synthetic construct
tgacaatctatgaaaaccttgcgcccgtgaccacatttggaaagaccaat

SEQ ID NO: 2754 - DNA, 50 bp, Artificial sequence
  Synthetic construct
tggctgccacccgtgcccgccgagcgcaacggggccatcgtcaaatacac

SEQ ID NO: 2755 - DNA, 50 bp, Artificial sequence
  Synthetic construct
cccaagctctacggcagccttcccctttgtgtgcttttggagcgggcagg

SEQ ID NO: 2756 - DNA, 50 bp, Artificial sequence
  Synthetic construct
tcccttatcaactctgacagcccgactttggcgtcccatgtccctctctc

SEQ ID NO: 2757 - DNA, 50 bp, Artificial sequence
  Synthetic construct
ggaactacggccttggccttcttcagttctagcgtcaacccggtgctcta

SEQ ID NO: 2758 - DNA, 50 bp, Artificial sequence
  Synthetic construct
ctagccgtcggcccacgctcaccactttctttggcagacggaagtctcgc

SEQ ID NO: 2759 - DNA, 50 bp, Artificial sequence
  Synthetic construct
tcagcgacagcagctccttcctggacacgcagtgtgacagcagcgtcagc

SEQ ID NO: 2760 - DNA, 50 bp, Artificial sequence
  Synthetic construct
cacgctaggtgaacaggggctgccgcatcagagccacagacagaggagca

SEQ ID NO: 2761 - DNA, 50 bp, Artificial sequence
  Synthetic construct
gcaaccagtacctggtgacgcacaagcagagcctggaggacatgctggag

SEQ ID NO: 2762 - DNA, 50 bp, Artificial sequence
  Synthetic construct
taatcagtgtgatgttagaagatcgaatcatatcctgtcctgtatctgtc

SEQ ID NO: 2763 - DNA, 50 bp, Artificial sequence
  Synthetic construct
gctgccaggaggaaggaggggggctcagagacgggggtcggtgagggagg

SEQ ID NO: 2764 - DNA, 50 bp, Artificial sequence
  Synthetic construct
tcggaacagtacagaggagcgaatcgatatagatgcagaagagaaaagtc

SEQ ID NO: 2765 - DNA, 50 bp, Artificial sequence
  Synthetic construct
ccggcaccttctgccgcctgatgcccttccgcctcagcagcaagtccgtg

SEQ ID NO: 2766 - DNA, 50 bp, Artificial sequence
  Synthetic construct
gcttcaccaagagcaagccacgaccccgcaagactggccgcaggaaggca

SEQ ID NO: 2767 - DNA, 50 bp, Artificial sequence
  Synthetic construct
ccatcctttatggcttcctctcctaccgcttcaagcagggcttccgcagg

SEQ ID NO: 2768 - DNA, 50 bp, Artificial sequence
  Synthetic construct
catgtgccccccactcccctgccagcaggaagccctgcaaccagaacccg

SEQ ID NO: 2769 - DNA, 50 bp, Artificial sequence
  Synthetic construct
ggccgtgctgggcttcttcgcgccgctgctggtcatctgcctgtgctacc

SEQ ID NO: 2770 - DNA, 50 bp, Artificial sequence
  Synthetic construct
cattctcatcaaccgggtgctggcctcgtgctacgcggtcatcgaggagc

SEQ ID NO: 2771 - DNA, 50 bp, Artificial sequence
  Synthetic construct
ggggaagctgccatactgctctggacccccagtgtagggctggtgctgtg

SEQ ID NO: 2772 - DNA, 50 bp, Artificial sequence
  Synthetic construct
ccaactgctcttcacgaagtgactccaagaccatgacagagagcttcagc

SEQ ID NO: 2773 - DNA, 50 bp, Artificial sequence
  Synthetic construct
atttgacctacttgctggggtacagttgcttccttttgaacctccaacag

SEQ ID NO: 2774 - DNA, 50 bp, Artificial sequence
  Synthetic construct
taaatacctctaatagatgtttcaacagcacagtatcttcaaggaagcag

SEQ ID NO: 2775 - DNA, 50 bp, Artificial sequence
  Synthetic construct
cggctgcatcgaaggccgctcagagccagatcactacgttgtcatcgggg

SEQ ID NO: 2776 - DNA, 50 bp, Artificial sequence
  Synthetic construct
tgtcccattttaatgactgcccagattcccacactcagttctgcttccat

SEQ ID NO: 2777 - DNA, 50 bp, Artificial sequence
  Synthetic construct
gtagtgtaagcagcttagtaattgtgtctggaatgacagcagaagaaaaa

SEQ ID NO: 2778 - DNA, 50 bp, Artificial sequence
  Synthetic construct
ttgaatcttggactgaaccttagtgagggggatggagaggaggtctacca

SEQ ID NO: 2779 - DNA, 50 bp, Artificial sequence
  Synthetic construct
aggccagcgtgtcttacagtgacccacccccaaagtacgaggagatagtg

SEQ ID NO: 2780 - DNA, 50 bp, Artificial sequence
  Synthetic construct
ggtgcccttgttcagcactcagctctgcaacagctcttgcgtgtacagcg

SEQ ID NO: 2781 - DNA, 50 bp, Artificial sequence
  Synthetic construct
tccaggagggacaggacctctattcccgcctggttcagcagcggctgatg

SEQ ID NO: 2782 - DNA, 50 bp, Artificial sequence
  Synthetic construct
ggcagcgggccacagggacaccttgtacacgatgctgataaagtgggtca

SEQ ID NO: 2783 - DNA, 50 bp, Artificial sequence
  Synthetic construct
gtaggtatcgccgagttatcactgtgcatcagatctctccagaagaaatg

SEQ ID NO: 2784 - DNA, 50 bp, Artificial sequence
  Synthetic construct
gaaaaatgaacccaatcctcagaggtttgaccgaattgcacacacaaagg

SEQ ID NO: 2785 - DNA, 50 bp, Artificial sequence
  Synthetic construct
cgtctacttcgagaaatcgcccaacttctgcacgtacagcggacgcctgg

SEQ ID NO: 2786 - DNA, 50 bp, Artificial sequence
  Synthetic construct
acgggacacaagacaggcagtgcaacaagacatccaacggaagcgacagc

SEQ ID NO: 2787 - DNA, 50 bp, Artificial sequence
  Synthetic construct
ggtggcaactctaggcttcatctactacctgtacgagaaaaggactgtgt

SEQ ID NO: 2788 - DNA, 50 bp, Artificial sequence
  Synthetic construct
gagagtgggggctaaggaacagaaggattacctgctgacaatgcagaagt

SEQ ID NO: 2789 - DNA, 50 bp, Artificial sequence
  Synthetic construct
ctccacaattaatcattccaaagagagtaaacccactttttccagggcaa

SEQ ID NO: 2790 - DNA, 50 bp, Artificial sequence
  Synthetic construct
aagcgtgactccacctactcgcagctctcccccagacactactactcagg

SEQ ID NO: 2791 - DNA, 50 bp, Artificial sequence
  Synthetic construct
ggctttagtgcctgcatgtttggtctctacagctttatgccagtcgtcat

SEQ ID NO: 2792 - DNA, 50 bp, Artificial sequence
  Synthetic construct
tcaggttgtggaggggaccccaagtgcatggacagggtgtgtttctggcg

SEQ ID NO: 2793 - DNA, 50 bp, Artificial sequence
  Synthetic construct
atcgtcattgtcattgtcagcctctgtacaactcccatccctgaggaaca

SEQ ID NO: 2794 - DNA, 50 bp, Artificial sequence
  Synthetic construct
tcagttgttttccaataatagttctagttgaattgatgcaccatatttat

SEQ ID NO: 2795 - DNA, 50 bp, Artificial sequence
  Synthetic construct
ccatatgacatcccgtgacatcgaagtacagggcttccgcatccctaagg

SEQ ID NO: 2796 - DNA, 50 bp, Artificial sequence
  Synthetic construct
tatggctcttattattttcaggtatgtttcttcacttcctagtttattga

SEQ ID NO: 2797 - DNA, 50 bp, Artificial sequence
  Synthetic construct
aggactgggttctcattagagactcatctcgaacaggatctgctttcaag

SEQ ID NO: 2798 - DNA, 50 bp, Artificial sequence
  Synthetic construct
agagtccagtcccccagccccatccaaggccaggaagttgctgcctgtcc

SEQ ID NO: 2799 - DNA, 50 bp, Artificial sequence
  Synthetic construct
ggcagttttgtgaccactctgttttccgtttctctggcagtcacttccca

SEQ ID NO: 2800 - DNA, 50 bp, Artificial sequence
  Synthetic construct
agagatcgcccatagcatccagactttacttgatgatgccaccgaactgt

SEQ ID NO: 2801 - DNA, 50 bp, Artificial sequence
  Synthetic construct
gacctcgtgtttgagtggctggaagatgctcctgctgtccaagtggctga

SEQ ID NO: 2802 - DNA, 50 bp, Artificial sequence
  Synthetic construct
atctagccaaagataaaccgctatcattatttatgcatctaatcctcttg

SEQ ID NO: 2803 - DNA, 50 bp, Artificial sequence
  Synthetic construct
tcatcattggtagcctagctgtaattctgcccccactcagcccctacacc

SEQ ID NO: 2804 - DNA, 50 bp, Artificial sequence
  Synthetic construct
tatgtatggattgagtccgtttcctggctctccgtttgaaacagagcttg

SEQ ID NO: 2805 - DNA, 50 bp, Artificial sequence
  Synthetic construct
acctccgtgcccgaccatgttgtctggtccctgttcaacactctcttcat

SEQ ID NO: 2806 - DNA, 50 bp, Artificial sequence
  Synthetic construct
atcaatggtaagacaggcagccctaccgatcatggaactatcacaagagc

SEQ ID NO: 2807 - DNA, 50 bp, Artificial sequence
  Synthetic construct
acaccgagggcatctgggagctggtgaccggaggggtcttctactgcctg

SEQ ID NO: 2808 - DNA, 50 bp, Artificial sequence
  Synthetic construct
tgtgtcttcttagttttggtgtcctttttccttagcctgttggattccca

SEQ ID NO: 2809 - DNA, 50 bp, Artificial sequence
  Synthetic construct
attctggtggaattttttctgaagggacattctgttcacccaaggcttga

SEQ ID NO: 2810 - DNA, 50 bp, Artificial sequence
  Synthetic construct
acactaatacatctgatgagattattgggctgtcttatggagtggtaagc

SEQ ID NO: 2811 - DNA, 50 bp, Artificial sequence
  Synthetic construct
gggccagtgactgagggtcttatttcccggaatgctcaggaaggcggtgc

SEQ ID NO: 2812 - DNA, 50 bp, Artificial sequence
  Synthetic construct
ggagcccagtgacattgtctatctcatccgctccgaccccctggctcacg

SEQ ID NO: 2813 - DNA, 50 bp, Artificial sequence
  Synthetic construct
agtggactcctccacctcagaatcatctgggaaataaaaataggatagag

SEQ ID NO: 2814 - DNA, 50 bp, Artificial sequence
  Synthetic construct
ttttgtactttcaaaatgagcatcccccagacagtctgcctggcatgatt

SEQ ID NO: 2815 - DNA, 50 bp, Artificial sequence
  Synthetic construct
acgacatctgcaaggtctacctggcacggtggggcatccaaggacgatgg

SEQ ID NO: 2816 - DNA, 50 bp, Artificial sequence
  Synthetic construct
gtttaatggcattaccatttattcctgcatcgaaccttttttttccagtt

SEQ ID NO: 2817 - DNA, 50 bp, Artificial sequence
  Synthetic construct
gatgatcctgacagtgttctgcctgagtgtttttgccttgatcggactgc

SEQ ID NO: 2818 - DNA, 50 bp, Artificial sequence
  Synthetic construct
ccttctccttgaatagcccagagaattcatctaaacagccttcctacagc

SEQ ID NO: 2819 - DNA, 50 bp, Artificial sequence
  Synthetic construct
gccaagtacctgtggtttcacattgttggagcatttgtggtattctggct

SEQ ID NO: 2820 - DNA, 50 bp, Artificial sequence
  Synthetic construct
gcacacaagacagaccgctacaagcaggaactagaggaactgaatcgcct

SEQ ID NO: 2821 - DNA, 50 bp, Artificial sequence
  Synthetic construct
gggaaggtgattgagtttgacaagcctgaagtccttgcagagaagccaga

SEQ ID NO: 2822 - DNA, 50 bp, Artificial sequence
  Synthetic construct
ccctgcgccctgatgccgcagactctgcaaccttcatgctgcccgctgcc

SEQ ID NO: 2823 - DNA, 50 bp, Artificial sequence
  Synthetic construct
ccgacatagccgcaaggctaccatgagcttcggtatcttgctgtggtcag

SEQ ID NO: 2824 - DNA, 50 bp, Artificial sequence
  Synthetic construct
caacctcaccagcaaccttgccagcctggtctcccagggtatgattcagc

SEQ ID NO: 2825 - DNA, 50 bp, Artificial sequence
  Synthetic construct
ttcctacttggttcatttttcattctcacttctgttcttcagattgtgta

SEQ ID NO: 2826 - DNA, 50 bp, Artificial sequence
  Synthetic construct
gagatcagaaggtggttggtgacctggaagcggcccggcgttttggctcc

SEQ ID NO: 2827 - DNA, 50 bp, Artificial sequence
  Synthetic construct
tcggacccctcttccaccaggtgctccctccccagaatcaaagaagaacc

SEQ ID NO: 2828 - DNA, 50 bp, Artificial sequence
  Synthetic construct
ggccgccctcgagcgccgccactggctgaactcgtacatgcacaagctgc

SEQ ID NO: 2829 - DNA, 50 bp, Artificial sequence
  Synthetic construct
tgtcgggcatcaatgcgatcaactactatgcggacaccatctacacatct

SEQ ID NO: 2830 - DNA, 50 bp, Artificial sequence
  Synthetic construct
cacccaagtggtgaccatagccgtctactctttctttgccctctccctgg

SEQ ID NO: 2831 - DNA, 50 bp, Artificial sequence
  Synthetic construct
cctgggtgtagaggtggatgactttcctgaggtggacatttcccagcatt

SEQ ID NO: 2832 - DNA, 50 bp, Artificial sequence
  Synthetic construct
cataacacacagagccgggtggtgacaaggccctgccagtgccaggtgcg

SEQ ID NO: 2833 - DNA, 50 bp, Artificial sequence
  Synthetic construct
cagttttccctggactatgattttcaggctaatcagcttactgtgggcgt

SEQ ID NO: 2834 - DNA, 50 bp, Artificial sequence
  Synthetic construct
cagtacaagttctactcagtgaatgtggattacagcaaactaaagaaaga

SEQ ID NO: 2835 - DNA, 50 bp, Artificial sequence
  Synthetic construct
tcctcacctctgtgtcttcttcgttttggtgtcctttttccttagcctgt

SEQ ID NO: 2836 - DNA, 50 bp, Artificial sequence
  Synthetic construct
acgcaggcaccgcagctactctcctcccttgccctccggcctcagttcct

SEQ ID NO: 2837 - DNA, 50 bp, Artificial sequence
  Synthetic construct
agtctgccatacgaggaaatcgacttcttccagagagaccaatgccttct

SEQ ID NO: 2838 - DNA, 50 bp, Artificial sequence
  Synthetic construct
catgtccttccccctcgccagcattgccgtctacaactccgtggtgtttg

SEQ ID NO: 2839 - DNA, 50 bp, Artificial sequence
  Synthetic construct
tctccggtacatcgccaacctcatctcctgcttccctagtgtgtgtgtcc

SEQ ID NO: 2840 - DNA, 50 bp, Artificial sequence
  Synthetic construct
cactttgcctcgactgccctttctggctgctctccagcgcctgtgccctg

SEQ ID NO: 2841 - DNA, 50 bp, Artificial sequence
  Synthetic construct
cctgatctaccgtggaggctccctagtcatcctaaggtccagtgtgacat

SEQ ID NO: 2842 - DNA, 50 bp, Artificial sequence
  Synthetic construct
ccagggaaagttcctgtcacatcgtcactatctccagctcagagtttgat

SEQ ID NO: 2843 - DNA, 50 bp, Artificial sequence
  Synthetic construct
cttgctctgtgttcctctggctcacaatatttttggtctcattggcccca

SEQ ID NO: 2844 - DNA, 50 bp, Artificial sequence
  Synthetic construct
ctatttcaggcacttggaacttacattattgtaggggtacaactggaaac

SEQ ID NO: 2845 - DNA, 50 bp, Artificial sequence
  Synthetic construct
gccctcggccatgactatgtatgccctggtggtggtgtcttgcttcctca

SEQ ID NO: 2846 - DNA, 50 bp, Artificial sequence
  Synthetic construct
gaggcggtcttcgctgtgaacgcactcaacatctccgagaagcagcatga

SEQ ID NO: 2847 - DNA, 50 bp, Artificial sequence
  Synthetic construct
tcccccgagtacctctgggacgacaggaagccccagccacccagcctgaa

SEQ ID NO: 2848 - DNA, 50 bp, Artificial sequence
  Synthetic construct
ccctgcctcaccttttccatagcagtgactgaggttcaaaagagcattaa

SEQ ID NO: 2849 - DNA, 50 bp, Artificial sequence
  Synthetic construct
cagcgggactggcagaacgagtctaaggagggcctggctattcctttgcg

SEQ ID NO: 2850 - DNA, 50 bp, Artificial sequence
  Synthetic construct
gaaagataaagaaggcttcactcttccacccgaatttactgaggaaaaag

SEQ ID NO: 2851 - DNA, 50 bp, Artificial sequence
  Synthetic construct
acagcttggtgaagagttactagctcaaggtaaatatgagaagggtgtag

SEQ ID NO: 2852 - DNA, 50 bp, Artificial sequence
  Synthetic construct
ctctgagcctcggtttctacatctgcataacgacagcatatttaccattg

SEQ ID NO: 2853 - DNA, 50 bp, Artificial sequence
  Synthetic construct
agcttaaaatagaacgtgaagtagcctgtgttgcaaaatacaaaccaccg

SEQ ID NO: 2854 - DNA, 50 bp, Artificial sequence
  Synthetic construct
ggagcacagaaaaggcagaccgttcccaggcagtcccagaaagtagcgtg

SEQ ID NO: 2855 - DNA, 50 bp, Artificial sequence
  Synthetic construct
tctctgagatcctctatgaagacctgcactttgtcgctgtcatccttgct

SEQ ID NO: 2856 - DNA, 50 bp, Artificial sequence
  Synthetic construct
tcttcatgggtaatatgcttcgtggcataggggaaacccccatagtacca

SEQ ID NO: 2857 - DNA, 50 bp, Artificial sequence
  Synthetic construct
tcattggccgctatgtcctgctggctttccttagtgccatcttccttgga

SEQ ID NO: 2858 - DNA, 50 bp, Artificial sequence
  Synthetic construct
cccactcttgtccctgctcctgttagctctgcataagttcctgcgcctgc

SEQ ID NO: 2859 - DNA, 50 bp, Artificial sequence
  Synthetic construct
gtggatcacagtgaaggatgcttccgtcagggcaccccggagatgtcgag

SEQ ID NO: 2860 - DNA, 50 bp, Artificial sequence
  Synthetic construct
tgaaccagacccccgtggtagacgtgagtatcccgtgccgcaaggtgtgt

SEQ ID NO: 2861 - DNA, 50 bp, Artificial sequence
  Synthetic construct
tacctattgccactaacatcctttttttttctggagtagctgaactgatt

SEQ ID NO: 2862 - DNA, 50 bp, Artificial sequence
  Synthetic construct
tatccattattacaacttatttgccacactggaagaacctcaacctggac

SEQ ID NO: 2863 - DNA, 50 bp, Artificial sequence
  Synthetic construct
tccagttgagtttttatcatgaagggatgctgaattttactgaatacttt

SEQ ID NO: 2864 - DNA, 50 bp, Artificial sequence
  Synthetic construct
gcacttccttgacgttccatataatttttgccttgctcaatgctttccag

SEQ ID NO: 2865 - DNA, 50 bp, Artificial sequence
  Synthetic construct
gggtccagaaccagaacggtcttgatgcaggtcttgatccagagcaccca

SEQ ID NO: 2866 - DNA, 50 bp, Artificial sequence
  Synthetic construct
ccagtaccgcaaaagctgcaaggagattctgaacaggctcctgcacagac

SEQ ID NO: 2867 - DNA, 50 bp, Artificial sequence
  Synthetic construct
ctcatccctttcctccactcgatgcctggtttggctaccacccgtatacc

SEQ ID NO: 2868 - DNA, 50 bp, Artificial sequence
  Synthetic construct
tgatcacgctgatggcaaccacatttggacagaagggaggaaaccactgg

SEQ ID NO: 2869 - DNA, 50 bp, Artificial sequence
  Synthetic construct
tccagggcattgtatatggagccattgcattctcattgctcttcttctgc

SEQ ID NO: 2870 - DNA, 50 bp, Artificial sequence
  Synthetic construct
atactgacatcttacaaagctaattacctaattgtagaggatgctatctg

SEQ ID NO: 2871 - DNA, 50 bp, Artificial sequence
  Synthetic construct
acgttttattcattccgttaccattactgtaaccacgatcagttgtcaag

SEQ ID NO: 2872 - DNA, 50 bp, Artificial sequence
  Synthetic construct
gatcaattcttggttgtcatcatttcagaaagtgggagtttgtatcacag

SEQ ID NO: 2873 - DNA, 50 bp, Artificial sequence
  Synthetic construct
tgggctgcatgatctttcctgatggctgggatgccgagaccatccgggac

SEQ ID NO: 2874 - DNA, 50 bp, Artificial sequence
  Synthetic construct
gtggggtctgtgatggcgttcgcacctgtacccacggcgaggacgaggat

SEQ ID NO: 2875 - DNA, 50 bp, Artificial sequence
  Synthetic construct
ttttatacaccaccaaactttgttcttgctcttgttttgccctcaattgt

SEQ ID NO: 2876 - DNA, 50 bp, Artificial sequence
  Synthetic construct
cattaatcaagaggaagccagtggaacatctttacatcagaaagccatca

SEQ ID NO: 2877 - DNA, 50 bp, Artificial sequence
  Synthetic construct
agtttctctccctgaaccacattttgagctgagtgaaggtctcaggttgg

SEQ ID NO: 2878 - DNA, 50 bp, Artificial sequence
  Synthetic construct
agagtgtgattcagctttggtttgtctacttcgacctggagaactgtgtg

SEQ ID NO: 2879 - DNA, 50 bp, Artificial sequence
  Synthetic construct
cccatgcccacagcactggtaggagccccgctccggcctccctatctctg

SEQ ID NO: 2880 - DNA, 50 bp, Artificial sequence
  Synthetic construct
attctttacctgcttcccaatcccactgatgaggatcagcccatgccgag

SEQ ID NO: 2881 - DNA, 50 bp, Artificial sequence
  Synthetic construct
tgtcagacctgccgtacacatggggagaccgagactcagggggagcttgt

SEQ ID NO: 2882 - DNA, 50 bp, Artificial sequence
  Synthetic construct
tacacttcaagccaagacaccctaatatctgtgtcatacaccatccttac

SEQ ID NO: 2883 - DNA, 50 bp, Artificial sequence
  Synthetic construct
agaaaaagaccttgttctctcagtgacgtacaccatcatcactcccttgc

SEQ ID NO: 2884 - DNA, 50 bp, Artificial sequence
  Synthetic construct
gggcacaactgtggtgggatacttgccaaatgggaggtttaaggagttca

SEQ ID NO: 2885 - DNA, 50 bp, Artificial sequence
  Synthetic construct
ccactccccaggactggctgcaccgaagagcacagattctggagatcctt

SEQ ID NO: 2886 - DNA, 50 bp, Artificial sequence
  Synthetic construct
gaaactgcgctatgactcggctgtcaaggtgtccagtgccaccaatgagg

SEQ ID NO: 2887 - DNA, 50 bp, Artificial sequence
  Synthetic construct
ctgctggccctcacctctgccctcaccgtccacgtcctgggcaacctcac

SEQ ID NO: 2888 - DNA, 50 bp, Artificial sequence
  Synthetic construct
tccacaatggctccctcctgaacttctcagatgcaaagatgaacctctcg

SEQ ID NO: 2889 - DNA, 50 bp, Artificial sequence
  Synthetic construct
ggcggaaactccacatcggcaacttcagcctggattgggacctgggaaat

SEQ ID NO: 2890 - DNA, 50 bp, Artificial sequence
  Synthetic construct
ggccagaagttctcccaagatgacttccccttaggccctgtgagcatctc

SEQ ID NO: 2891 - DNA, 50 bp, Artificial sequence
  Synthetic construct
tcaagaaaaccattgtgctgcatgtcagcccggaagagcctcgaacactg

SEQ ID NO: 2892 - DNA, 50 bp, Artificial sequence
  Synthetic construct
cccctatctgtccctgaacaatggcttcctggatcaggttctgggcactg

SEQ ID NO: 2893 - DNA, 50 bp, Artificial sequence
  Synthetic construct
agatctcccagcacaagtgggaagcggacaaatactcagagcaggcacat

SEQ ID NO: 2894 - DNA, 50 bp, Artificial sequence
  Synthetic construct
tggcctacttttactccctgaaaaatataaacatctcctggagagctaca

SEQ ID NO: 2895 - DNA, 50 bp, Artificial sequence
  Synthetic construct
gcatagagaaaaaaaaatagaaaatactgttgtcctaagccccactctgg

SEQ ID NO: 2896 - DNA, 50 bp, Artificial sequence
  Synthetic construct
tgcagacccagaccacctaccggggcatcgttgattgcatggtcaagatt

SEQ ID NO: 2897 - DNA, 50 bp, Artificial sequence
  Synthetic construct
cccttctaagtaaaaggcggaaatgtgggaagtatggcatcacgagcctg

SEQ ID NO: 2898 - DNA, 50 bp, Artificial sequence
  Synthetic construct
tgattgtattacgaagcccatgtgtgctggatgctgatgaaattgctgcc

SEQ ID NO: 2899 - DNA, 50 bp, Artificial sequence
  Synthetic construct
gagttgttctctaccatagatgacattgtgctgaccatccttctttgtga

SEQ ID NO: 2900 - DNA, 50 bp, Artificial sequence
  Synthetic construct
cttcctgaccacctcggaggccatgcggttctggacaccgctcaccatct

SEQ ID NO: 2901 - DNA, 50 bp, Artificial sequence
  Synthetic construct
cttcagcgagtgtaggttcagcctgtcactcacagacctctgcatcatca

SEQ ID NO: 2902 - DNA, 50 bp, Artificial sequence
  Synthetic construct
tcaggacctctttttgccttcactcctctgactcagtttcctgcttacgg

SEQ ID NO: 2903 - DNA, 50 bp, Artificial sequence
  Synthetic construct
ttgattgggatatttaacagatcattccgaactgggattaaaagaaggat

SEQ ID NO: 2904 - DNA, 50 bp, Artificial sequence
  Synthetic construct
caccatataataagaacagaagatatcagcagtgacatatttagaagaag

SEQ ID NO: 2905 - DNA, 50 bp, Artificial sequence
  Synthetic construct
ggtcggcggaggggcctgcggcgacttggctagtgagatcagagaggacg

SEQ ID NO: 2906 - DNA, 50 bp, Artificial sequence
  Synthetic construct
gcttggcactgggctcctagcactcagcttccatgttctctggctcatag

SEQ ID NO: 2907 - DNA, 50 bp, Artificial sequence
  Synthetic construct
tcggcctcgctccgctggcaccaggcactgtacctgctggagttcttcct

SEQ ID NO: 2908 - DNA, 50 bp, Artificial sequence
  Synthetic construct
ccaagacctccacggccttgtgtcaagaaatctccacaaagtgacagtga

SEQ ID NO: 2909 - DNA, 50 bp, Artificial sequence
  Synthetic construct
cctttgcctgctatgcggccctcttgtgcctctcggcctccatcatctac

SEQ ID NO: 2910 - DNA, 50 bp, Artificial sequence
  Synthetic construct
attaatcacctcacctgccaccttgccatttgtgtaccttgaaactggag

SEQ ID NO: 2911 - DNA, 50 bp, Artificial sequence
  Synthetic construct
ctccaagaactaaacaaacagttctcccagctatccagtgaccccaacaa

SEQ ID NO: 2912 - DNA, 50 bp, Artificial sequence
  Synthetic construct
ccaccgtccaagaactgcacacatgcttacctgtctccgtaccccttcat

SEQ ID NO: 2913 - DNA, 50 bp, Artificial sequence
  Synthetic construct
accaaccttcacgttctaataatctgtcccgatgtcaaggccctggctct

SEQ ID NO: 2914 - DNA, 50 bp, Artificial sequence
  Synthetic construct
gcactatgcgctcatcatgcccctgtacacacacttcacccacagctata

SEQ ID NO: 2915 - DNA, 50 bp, Artificial sequence
  Synthetic construct
cgtctctctgaatgtcaatgaaaacaattatgttttactagagaacttgg

SEQ ID NO: 2916 - DNA, 50 bp, Artificial sequence
  Synthetic construct
ggcagaggagtgtcttacagcaatccagtatttgagagcaatgaagaaca

SEQ ID NO: 2917 - DNA, 50 bp, Artificial sequence
  Synthetic construct
acctcttctctcagggacacaccacatctaagtcccgttggattctcttc

SEQ ID NO: 2918 - DNA, 50 bp, Artificial sequence
  Synthetic construct
caggttggtcctgtagcagtggcaataaagtcaaaactacgaaggcaagt

SEQ ID NO: 2919 - DNA, 50 bp, Artificial sequence
  Synthetic construct
agttctactacaaactatctcaagaactaaagggtgacatggaacaggtc

SEQ ID NO: 2920 - DNA, 50 bp, Artificial sequence
  Synthetic construct
agcacaagtgcccggaggaccaggatgccgagggcttccagaagctgttg

SEQ ID NO: 2921 - DNA, 50 bp, Artificial sequence
  Synthetic construct
taatgctgcaaactagcaaggagaatcatgctttagcttcaagcagttta

SEQ ID NO: 2922 - DNA, 50 bp, Artificial sequence
  Synthetic construct
tacgagatgtgcaaatcatgacacagaagggcagtatgaagcctgtgaag

SEQ ID NO: 2923 - DNA, 50 bp, Artificial sequence
  Synthetic construct
aacgagacgctcaacttctggacgcacttcatcccgctgctgctgttcct

SEQ ID NO: 2924 - DNA, 50 bp, Artificial sequence
  Synthetic construct
ggccaaatgtctgcaatttcatattgttggagcctttattgtatccctgg

SEQ ID NO: 2925 - DNA, 50 bp, Artificial sequence
  Synthetic construct
tattagctgttttgcaccttcatagtatgaaaaggattgaactggatgac

SEQ ID NO: 2926 - DNA, 50 bp, Artificial sequence
  Synthetic construct
cacttaaaccaccacctgagcaggatagtgggagaaaatatcagcagaat

SEQ ID NO: 2927 - DNA, 50 bp, Artificial sequence
  Synthetic construct
gacccggaagtttacctagacaagctgcctagagagtgccctctggccca

SEQ ID NO: 2928 - DNA, 50 bp, Artificial sequence
  Synthetic construct
ccccattgccaagggccgtgttgccatcgccgggggagccctcttcatcc

SEQ ID NO: 2929 - DNA, 50 bp, Artificial sequence
  Synthetic construct
ctgtttttctccccattgtctctgtctgctttttactgcctgatgtggtc

SEQ ID NO: 2930 - DNA, 50 bp, Artificial sequence
  Synthetic construct
tgcactgagacaatggagttttctaggtacaggatcatgtcatctgcaaa

SEQ ID NO: 2931 - DNA, 50 bp, Artificial sequence
  Synthetic construct
aatcagactaagaaagcagaatttgtacgcacagcagaaaaatttaaaaa

SEQ ID NO: 2932 - DNA, 50 bp, Artificial sequence
  Synthetic construct
tttcgacaattttgccgcttccctgaacctgctcatgttggcctttctcg

SEQ ID NO: 2933 - DNA, 50 bp, Artificial sequence
  Synthetic construct
acccagcgagctgccattggcaattccatgttccaggaagtgagagccat

SEQ ID NO: 2934 - DNA, 50 bp, Artificial sequence
  Synthetic construct
cacctcatgcttgtgtattgtgttgaatttcattgaactgagttttttgg

SEQ ID NO: 2935 - DNA, 50 bp, Artificial sequence
  Synthetic construct
ttatgtacacagggtttagctccactcataagtgagaacatgcaatattt

SEQ ID NO: 2936 - DNA, 50 bp, Artificial sequence
  Synthetic construct
gcgcaggtcttcttgaataaaaatcttttccttcagtacaacagtgacaa

SEQ ID NO: 2937 - DNA, 50 bp, Artificial sequence
  Synthetic construct
attatattctatacctattcatcaccttccttgttctcccgcaccttcac

SEQ ID NO: 2938 - DNA, 50 bp, Artificial sequence
  Synthetic construct
aatcatcattctgggacctggactctggacactacaggaggggaccacag

SEQ ID NO: 2939 - DNA, 50 bp, Artificial sequence
  Synthetic construct
tccttatattggaattgggacgagcctcatgaatgactatcctaaacata

SEQ ID NO: 2940 - DNA, 50 bp, Artificial sequence
  Synthetic construct
tttaaatatacatttcaccctagcattcataatacccattaccctcccag

SEQ ID NO: 2941 - DNA, 50 bp, Artificial sequence
  Synthetic construct
tacctgcatcacaagtacccagggacttccattgtgtttgacatgagcct

SEQ ID NO: 2942 - DNA, 50 bp, Artificial sequence
  Synthetic construct
gttctacatggcaagtggcacttttctttatcctaacttttacagtgtat

SEQ ID NO: 2943 - DNA, 50 bp, Artificial sequence
  Synthetic construct
tttgggtggtcaaaatgagacccacaataatttgttatttgtctgtgtgt

SEQ ID NO: 2944 - DNA, 50 bp, Artificial sequence
  Synthetic construct
acacaataaatggaaacatctaccctcccttaatcaccattgcctacagt

SEQ ID NO: 2945 - DNA, 50 bp, Artificial sequence
  Synthetic construct
accccaggattaaagaaaataggaagcctcaaagtgagctgtgaggagtt

SEQ ID NO: 2946 - DNA, 50 bp, Artificial sequence
  Synthetic construct
gacgcctgccgacagatcgacgagctgagcgtgggcagcgacaccataga

SEQ ID NO: 2947 - DNA, 50 bp, Artificial sequence
  Synthetic construct
acagtcaagaggaaagttccatatctgacattaacaagaaatttagtaaa

SEQ ID NO: 2948 - DNA, 50 bp, Artificial sequence
  Synthetic construct
cctcacactggtcttcatcggctacagtagtaccatctttctgtatgtca

SEQ ID NO: 2949 - DNA, 50 bp, Artificial sequence
  Synthetic construct
cagaggcggctcctctcagccctgccaggattggaggtggtggtttttgt

SEQ ID NO: 2950 - DNA, 50 bp, Artificial sequence
  Synthetic construct
ggtgtcttgccgatgctgttaactgggatgttttctctgttttacaaatg

SEQ ID NO: 2951 - DNA, 50 bp, Artificial sequence
  Synthetic construct
gagtcattgaggaaagcacccacaagcccacagccattcccctggaaatt

SEQ ID NO: 2952 - DNA, 50 bp, Artificial sequence
  Synthetic construct
tggtcctcttcctgccgagctgccatcttctaagtcacaggtgcaagtgc

SEQ ID NO: 2953 - DNA, 50 bp, Artificial sequence
  Synthetic construct
gctatttcctggaaacaaatgcaaagcagtataatatggttgacaaaaac

SEQ ID NO: 2954 - DNA, 50 bp, Artificial sequence
  Synthetic construct
aacagagggtgggactgaaggcaagattgtcccttcctacgattctgcta

SEQ ID NO: 2955 - DNA, 50 bp, Artificial sequence
  Synthetic construct
ctctcctctctctggttgctctgtaattcgtacaacagtgtctttcccat

SEQ ID NO: 2956 - DNA, 50 bp, Artificial sequence
  Synthetic construct
ctctgtattgtgtgtgtaggcagaagtaccagcatcatcagaccttcctc

SEQ ID NO: 2957 - DNA, 50 bp, Artificial sequence
  Synthetic construct
catggatcagaatgatgaccgcctgaaaccagaagcagacaccctccctc

SEQ ID NO: 2958 - DNA, 50 bp, Artificial sequence
  Synthetic construct
gacaacttggtccgcatagtcccctccctcgccgaaggtctggatgatgg

SEQ ID NO: 2959 - DNA, 50 bp, Artificial sequence
  Synthetic construct
taagcgggaaccttgagcaagcaaagaaaattagttactcaaacaaccct

SEQ ID NO: 2960 - DNA, 50 bp, Artificial sequence
  Synthetic construct
tgtaaccagcttcagggggttttggaaatgtgtggtcgaattggggatat

SEQ ID NO: 2961 - DNA, 50 bp, Artificial sequence
  Synthetic construct
ttaattcatatgttattgtcctggttactgtgaagcatcattcttccaga

SEQ ID NO: 2962 - DNA, 50 bp, Artificial sequence
  Synthetic construct
ttccccactgagcaagtgtccacagcatccccgacctcgcagaaccaagg

SEQ ID NO: 2963 - DNA, 50 bp, Artificial sequence
  Synthetic construct
cagcttcaaactcctgcgttcaagtgaatctcccacctagtatgtgtgat

SEQ ID NO: 2964 - DNA, 50 bp, Artificial sequence
  Synthetic construct
aaaaagcacattattataacctgtaatgacatgaagcgccagttaccaac

SEQ ID NO: 2965 - DNA, 50 bp, Artificial sequence
  Synthetic construct
gagtgaggaggattacatggacttgctgtggaccaccctctctgagtttc

SEQ ID NO: 2966 - DNA, 50 bp, Artificial sequence
  Synthetic construct
tgaacaataagctgagtgccctgccaagctgggctttcgccaacctctcc

SEQ ID NO: 2967 - DNA, 50 bp, Artificial sequence
  Synthetic construct
aaactatctcaagaactaaatggtgacatggaatgggttgctgactccct

SEQ ID NO: 2968 - DNA, 50 bp, Artificial sequence
  Synthetic construct
acggcacagaatggaactcaacagttacctcgtaccagtgcctccttagc

SEQ ID NO: 2969 - DNA, 50 bp, Artificial sequence
  Synthetic construct
tgaaaaccacccacctcaaggaacagaaagcatttgccctcatcagagaa

SEQ ID NO: 2970 - DNA, 50 bp, Artificial sequence
  Synthetic construct
tcttgctggagactccatctgagtacctggaaattgttcgtgagaaccac

SEQ ID NO: 2971 - DNA, 50 bp, Artificial sequence
  Synthetic construct
cgacaactctcagggagaaaactgtgttgttcttgtttataaccaagata

SEQ ID NO: 2972 - DNA, 50 bp, Artificial sequence
  Synthetic construct
ctgagccctgcctcctggacctctgtgttcagtgtcttccccaccatctg

SEQ ID NO: 2973 - DNA, 50 bp, Artificial sequence
  Synthetic construct
cgagtgagtgccatcgtcacctacgtgagctgcgactggttcagcaagag

SEQ ID NO: 2974 - DNA, 50 bp, Artificial sequence
  Synthetic construct
acctgcaccaactacgacacgccgctctggctcaacaccggcaagccccc

SEQ ID NO: 2975 - DNA, 50 bp, Artificial sequence
  Synthetic construct
ctgcactttcccccctgcctcccaacagtggccttcctatctggcttggt

SEQ ID NO: 2976 - DNA, 50 bp, Artificial sequence
  Synthetic construct
ctcactttactctgaactatacctcacatgcacacgagctttctgctcca

SEQ ID NO: 2977 - DNA, 50 bp, Artificial sequence
  Synthetic construct
ggatcatcttcactggcctgtttgccaacagaagctccaatgtcttcact

SEQ ID NO: 2978 - DNA, 50 bp, Artificial sequence
  Synthetic construct
cactgggaggcgatggaggctttgaacaggagggtatgagctttatgtca

SEQ ID NO: 2979 - DNA, 50 bp, Artificial sequence
  Synthetic construct
atttgagtccccgatctggagaatgtaccccaactccacggtccacatcc

SEQ ID NO: 2980 - DNA, 50 bp, Artificial sequence
  Synthetic construct
ctttattctttccctgctttgtttgtgtgttttgttcaattctttgttca

SEQ ID NO: 2981 - DNA, 50 bp, Artificial sequence
  Synthetic construct
tactacaaactgtctcaagaactaaatggtgacatggaatgggtcgctga

SEQ ID NO: 2982 - DNA, 50 bp, Artificial sequence
  Synthetic construct
accaggacctcaggaaggcttgaagaacttgacccagatgtcagccacct

SEQ ID NO: 2983 - DNA, 50 bp, Artificial sequence
  Synthetic construct
ccttcccgcagcacgtctatgggaacgtgacgtttatcagcgactcggtg

SEQ ID NO: 2984 - DNA, 50 bp, Artificial sequence
  Synthetic construct
gaactccaagtatcccattctctttctgttcctgctcatcacctatgtca

SEQ ID NO: 2985 - DNA, 50 bp, Artificial sequence
  Synthetic construct
ctcgccactgcgctcttcttcgtcagcgaccgcgccagggctgagcagca

SEQ ID NO: 2986 - DNA, 50 bp, Artificial sequence
  Synthetic construct
caggtgaaaccctcaaagtccgctactggcctcgggacagttggcccgtg

SEQ ID NO: 2987 - DNA, 50 bp, Artificial sequence
  Synthetic construct
aggcggaggagtgtggtggctggcagggtatgtgtttctggttctgttga

SEQ ID NO: 2988 - DNA, 50 bp, Artificial sequence
  Synthetic construct
tgtgtcttattagttttggtgccttttttccttagcctgttggattccca

SEQ ID NO: 2989 - DNA, 50 bp, Artificial sequence
  Synthetic construct
agaaaatgatttttgttccatcgtatatcaatatctttctgagactacag

SEQ ID NO: 2990 - DNA, 50 bp, Artificial sequence
  Synthetic construct
aaaaggctctctccgcttgcacgtctcacataattgtagtcatcttattc

SEQ ID NO: 2991 - DNA, 50 bp, Artificial sequence
  Synthetic construct
tttgatcctactcattagagcggatacaagtctcaacacaccaatgtact

SEQ ID NO: 2992 - DNA, 50 bp, Artificial sequence
  Synthetic construct
actgtgacagtgcttggcattaccacaactccaataccaccagacacttc

SEQ ID NO: 2993 - DNA, 50 bp, Artificial sequence
  Synthetic construct
cttctgcaaggtcctgaaaacctgaaccgggccacccaaagtattgaacg

SEQ ID NO: 2994 - DNA, 50 bp, Artificial sequence
  Synthetic construct
tatctacagtcttcgtaacaaggaaatcattaaagctatcaagaggacca

SEQ ID NO: 2995 - DNA, 50 bp, Artificial sequence
  Synthetic construct
gcctacaattccaacaaagtggtatctgttctctacactgtcattgttcc

SEQ ID NO: 2996 - DNA, 50 bp, Artificial sequence
  Synthetic construct
aaatagacaaaatcatctcgttgctttacggagtgcttacccctatgttg

SEQ ID NO: 2997 - DNA, 50 bp, Artificial sequence
  Synthetic construct
gtaacaaccgcaatagttttggcaaggaaacagttgaaaaagtggttcgc

SEQ ID NO: 2998 - DNA, 50 bp, Artificial sequence
  Synthetic construct
gctgccttagagatgtaccaccccaggaccacgctgcgcttccagcttgc

SEQ ID NO: 2999 - DNA, 50 bp, Artificial sequence
  Synthetic construct
aactgacaccaatcaacggaactgaggagactctttgctacaagcagacc

SEQ ID NO: 3000 - DNA, 50 bp, Artificial sequence
  Synthetic construct
cggacgctgggccagcaagccagggtttggttggtgcgggtgctgctcaa

SEQ ID NO: 3001 - DNA, 50 bp, Artificial sequence
  Synthetic construct
tcattacttccttcctgactggatacctctttggactgggaatgacacta

SEQ ID NO: 3002 - DNA, 50 bp, Artificial sequence
  Synthetic construct
gaaaagctgaccaatccagtgtttgtgggctacctgtgcatcgtgctgct

SEQ ID NO: 3003 - DNA, 50 bp, Artificial sequence
  Synthetic construct
ccttctgttgaagatgggaagccgcgccgctccctccgctgcacgcccag

SEQ ID NO: 3004 - DNA, 50 bp, Artificial sequence
  Synthetic construct
aagctgcacgccgactaccagtctcccgtctacttttacaccttctacca

SEQ ID NO: 3005 - DNA, 50 bp, Artificial sequence
  Synthetic construct
cactaccctcaccttcagcctgagttactgtggttccaatatcatcaatc

SEQ ID NO: 3006 - DNA, 50 bp, Artificial sequence
  Synthetic construct
cttagcaggttgtggaaatgcagccatacatacagggatgacttttaggt

SEQ ID NO: 3007 - DNA, 50 bp, Artificial sequence
  Synthetic construct
cttctactcttctactttgtgggttctattgagatagtcactatcctgat

SEQ ID NO: 3008 - DNA, 50 bp, Artificial sequence
  Synthetic construct
gaaacatctggaggtcaaactaggggagctgccaagctggatcttgatgc

SEQ ID NO: 3009 - DNA, 50 bp, Artificial sequence
  Synthetic construct
atccaatcactctactgaaaaagactcagccgcatcagtcatttttatgg

SEQ ID NO: 3010 - DNA, 50 bp, Artificial sequence
  Synthetic construct
attttccaaaccacactgcaccttcggaaaaacgagacttcatcacttgc

SEQ ID NO: 3011 - DNA, 50 bp, Artificial sequence
  Synthetic construct
gttctcattgtcataactattatctatgaccaccggctccatactcccat

SEQ ID NO: 3012 - DNA, 50 bp, Artificial sequence
  Synthetic construct
agttggaggggcttaccagaaggcagacacatctgggtcaggaagaggat

SEQ ID NO: 3013 - DNA, 50 bp, Artificial sequence
  Synthetic construct
cagcaaaaagaaggtactgccctggcaattgactccaattcttgttttga

SEQ ID NO: 3014 - DNA, 50 bp, Artificial sequence
  Synthetic construct
aagaccccaaatacttccgctacccagatgccttctatccccagcacttt

SEQ ID NO: 3015 - DNA, 50 bp, Artificial sequence
  Synthetic construct
tggccgtcggcaccctctgtgccctttcctccagtcaatggctgaggaca

SEQ ID NO: 3016 - DNA, 50 bp, Artificial sequence
  Synthetic construct
aacagcgagcaagcggacaggtcccagagagtctcagcaggacagcgagc

SEQ ID NO: 3017 - DNA, 50 bp, Artificial sequence
  Synthetic construct
agcctcaggacagagcgcctgaagatccgctggcacacgtctgacaacca

SEQ ID NO: 3018 - DNA, 50 bp, Artificial sequence
  Synthetic construct
aaatcctagaagaagcgcacatgcgccccaagctgaagcacacaggaagc

SEQ ID NO: 3019 - DNA, 50 bp, Artificial sequence
  Synthetic construct
cttgctgtacccactgcccaccgcaaaggcacgccacgtctgctgggccg

SEQ ID NO: 3020 - DNA, 50 bp, Artificial sequence
  Synthetic construct
gtctgtctgccactttacactgttgctcccatttcggtcactgaggccct

SEQ ID NO: 3021 - DNA, 50 bp, Artificial sequence
  Synthetic construct
aaggagaagaacctgtttgtcagcaccaccgtcaacatcttcaagtggct

SEQ ID NO: 3022 - DNA, 50 bp, Artificial sequence
  Synthetic construct
gccagatattccgagtatgagcaatggggcctgttccacggccagcccac

SEQ ID NO: 3023 - DNA, 50 bp, Artificial sequence
  Synthetic construct
ctgaaggcaacgtgacccaggagaactttgtggacatgcagcagcggtgc

SEQ ID NO: 3024 - DNA, 50 bp, Artificial sequence
  Synthetic construct
atgcgggcaactgctgttcaaggaccagcatgagggggccagggccaggg

SEQ ID NO: 3025 - DNA, 50 bp, Artificial sequence
  Synthetic construct
tcagctactgcctctcctacaagcatctcaagcacgagcggctccgcaaa

SEQ ID NO: 3026 - DNA, 50 bp, Artificial sequence
  Synthetic construct
acataaacttccatttacaaatgaggccacagagtcaccaagaggtcaaa

SEQ ID NO: 3027 - DNA, 50 bp, Artificial sequence
  Synthetic construct
gataccctgcccgacaccagccacacatggcggattcctggccccggagc

SEQ ID NO: 3028 - DNA, 50 bp, Artificial sequence
  Synthetic construct
acagcgcaagagtggaattattttctgtgtttcttcttgtctatctcctg

SEQ ID NO: 3029 - DNA, 50 bp, Artificial sequence
  Synthetic construct
ccacgctcagcggcaagcggcagccaggtccctgatgaaacacacaccac

SEQ ID NO: 3030 - DNA, 50 bp, Artificial sequence
  Synthetic construct
gtactctcttatgtccgaattggggccgctattctacgtttgccttcagc

SEQ ID NO: 3031 - DNA, 50 bp, Artificial sequence
  Synthetic construct
ctctgagttcctttctcctcttggttgtctcctacactgtaatacttgtt

SEQ ID NO: 3032 - DNA, 50 bp, Artificial sequence
  Synthetic construct
taacttctattactgggttgtcaacttctgcgatagcaactaacgggttt

SEQ ID NO: 3033 - DNA, 50 bp, Artificial sequence
  Synthetic construct
tacagggctgacctgccccttgacttccatatcatgggcaatgtggtata

SEQ ID NO: 3034 - DNA, 50 bp, Artificial sequence
  Synthetic construct
ggaactattcaatatagacctcgttacataacaggatatgctgtctggct

SEQ ID NO: 3035 - DNA, 50 bp, Artificial sequence
  Synthetic construct
agtccaagtattttgtagtctttatatatgttttgtacatcataagcagt

SEQ ID NO: 3036 - DNA, 50 bp, Artificial sequence
  Synthetic construct
gtttgtgtgcccatgagtatatgcatacgggtgaatgtttgtgtgcccat

SEQ ID NO: 3037 - DNA, 50 bp, Artificial sequence
  Synthetic construct
cttgttctgatctctttatccatagaatgatatctttttccttatcatgt

SEQ ID NO: 3038 - DNA, 50 bp, Artificial sequence
  Synthetic construct
ggatctgggattacatcgaaaacaaaatagaggtgtttgacggggctgtg

SEQ ID NO: 3039 - DNA, 50 bp, Artificial sequence
  Synthetic construct
aaaatggaattgtgccaactaaaggaatacatttcagccaacaagatgat

SEQ ID NO: 3040 - DNA, 50 bp, Artificial sequence
  Synthetic construct
accaagaaattaatggtagacttgtacccgaaggaccaacaccagactct

SEQ ID NO: 3041 - DNA, 50 bp, Artificial sequence
  Synthetic construct
ataactcactcagtcccagaaatgaatctgcaatgcatgagctactatca

SEQ ID NO: 3042 - DNA, 50 bp, Artificial sequence
  Synthetic construct
ttgtcctctaacacatcattgaagttacgaaaactcgaatcactgcgtcg

SEQ ID NO: 3043 - DNA, 50 bp, Artificial sequence
  Synthetic construct
gccttcatgccctaacagccagtcccctgttaaagtggaagacacctgtg

SEQ ID NO: 3044 - DNA, 50 bp, Artificial sequence
  Synthetic construct
agatgtgtcaaggccataccctgagccaggatgggaggccaagtgtccag

SEQ ID NO: 3045 - DNA, 50 bp, Artificial sequence
  Synthetic construct
ctccttcctctacacagacctggaaccggctgctctctatgacatcaagc

SEQ ID NO: 3046 - DNA, 50 bp, Artificial sequence
  Synthetic construct
tcattctgggagttacgagcttttctcttcttctgtgctcactggccctt

SEQ ID NO: 3047 - DNA, 50 bp, Artificial sequence
  Synthetic construct
agatttatgcccccaggggataacgtccacactgtcattttggatttcac

SEQ ID NO: 3048 - DNA, 50 bp, Artificial sequence
  Synthetic construct
aacttctcaaccttgcctgttctgacagtgtcatcaatagcatattcata

SEQ ID NO: 3049 - DNA, 50 bp, Artificial sequence
  Synthetic construct
aattctcattactgtttataggatgagcgaggcagaggggaggggaaagg

SEQ ID NO: 3050 - DNA, 50 bp, Artificial sequence
  Synthetic construct
ccctactaatcctctcatgcaatgacacatcaatatttgaaaaggttctt

SEQ ID NO: 3051 - DNA, 50 bp, Artificial sequence
  Synthetic construct
gtccccacctgttgcctgaaatcaacaagatcatttctgtcttctacact

SEQ ID NO: 3052 - DNA, 50 bp, Artificial sequence
  Synthetic construct
ctctgctgtccagaccatattgactttccatttgccctactgtggaccca

SEQ ID NO: 3053 - DNA, 50 bp, Artificial sequence
  Synthetic construct
gtgccctgcaccttcatttacctgcggccttgttcacaggagcccctgga

SEQ ID NO: 3054 - DNA, 50 bp, Artificial sequence
  Synthetic construct
agcactgctagtcatgctccgaagccactcacgggagggccgcagcaagg

SEQ ID NO: 3055 - DNA, 50 bp, Artificial sequence
  Synthetic construct
tgttcatgtacctaagacccacagcacactcctcctttaagattaataag

SEQ ID NO: 3056 - DNA, 50 bp, Artificial sequence
  Synthetic construct
tgcacacggcacagcaggagaccaacaagaccattgcagccagcgccagc

SEQ ID NO: 3057 - DNA, 50 bp, Artificial sequence
  Synthetic construct
ggcccctagccatgacaaggtggcctctatcttctacacagtccttactc

SEQ ID NO: 3058 - DNA, 50 bp, Artificial sequence
  Synthetic construct
tgtctatccttgttgctgttatgtcttctgctcgccttcacacacctatg

SEQ ID NO: 3059 - DNA, 50 bp, Artificial sequence
  Synthetic construct
agaagtgtaaacctagactagaaaaaactctagcaagtcatgtgctccat

SEQ ID NO: 3060 - DNA, 50 bp, Artificial sequence
  Synthetic construct
ctcactgtctcactgtctatttcatcccttgtggcgtgttcctggtcacc

SEQ ID NO: 3061 - DNA, 50 bp, Artificial sequence
  Synthetic construct
ctccagtagtcatctcttcagtcatgcaccgtgtagcccgccatgctgcc

SEQ ID NO: 3062 - DNA, 50 bp, Artificial sequence
  Synthetic construct
gcacatccacatccttctagctgacctctacctggttgtgccacccatgc

SEQ ID NO: 3063 - DNA, 50 bp, Artificial sequence
  Synthetic construct
cctgggctagaggtccgtgctgccctgtgcatcctcagagtttgactgta

SEQ ID NO: 3064 - DNA, 50 bp, Artificial sequence
  Synthetic construct
cgaggggacaccagctctgcacaagtcccgcagcacctatgaccagcgca

SEQ ID NO: 3065 - DNA, 50 bp, Artificial sequence
  Synthetic construct
atagcattggcctactccgtgaagtctagggacaagaagatggttggcga

SEQ ID NO: 3066 - DNA, 50 bp, Artificial sequence
  Synthetic construct
gcggtgcagcagtttgggagcccggtaggcagtgccctgagcacgaagtt

SEQ ID NO: 3067 - DNA, 50 bp, Artificial sequence
  Synthetic construct
tgatgtgaatggagatggcctgcgtgatgtgcttctctcctttgtgatgt

SEQ ID NO: 3068 - DNA, 50 bp, Artificial sequence
  Synthetic construct
aactcggacgagagcgacgcggagggcgatcttggggacggcgaggaggc

SEQ ID NO: 3069 - DNA, 50 bp, Artificial sequence
  Synthetic construct
cccgaggacaggctttttagcgcctacgccttgccgggtggtggtggcac

SEQ ID NO: 3070 - DNA, 50 bp, Artificial sequence
  Synthetic construct
acccttcttgcgccagaccatcggcacccccgtgattcagttgctcaacc

SEQ ID NO: 3071 - DNA, 50 bp, Artificial sequence
  Synthetic construct
attcattggattcgtttgtgtcctattgagctttttcatggctagagtat

SEQ ID NO: 3072 - DNA, 50 bp, Artificial sequence
  Synthetic construct
tcttgtcaacattaacactagcagtatttccaacactttatttttttaac

SEQ ID NO: 3073 - DNA, 50 bp, Artificial sequence
  Synthetic construct
tagcattcttcatatcaaatccactcaaggaagatcaaaagccttcagta

SEQ ID NO: 3074 - DNA, 50 bp, Artificial sequence
  Synthetic construct
gtctgttttatctccagcgtcacgttctgtggctccaacgtcttgaacca

SEQ ID NO: 3075 - DNA, 50 bp, Artificial sequence
  Synthetic construct
tgccgcagaatctggagatcacggtagtctcttcaagtggttgcaaaaaa

SEQ ID NO: 3076 - DNA, 50 bp, Artificial sequence
  Synthetic construct
actatttaggagcctacgtttttattatcttcaccgacttcctcattacc

SEQ ID NO: 3077 - DNA, 50 bp, Artificial sequence
  Synthetic construct
aatacaccttgattccaattcattctctcatttattcattcagcaaatat

SEQ ID NO: 3078 - DNA, 50 bp, Artificial sequence
  Synthetic construct
tacgcctacataagcccggtctctggctacagcgcagggaagagcaagtt

SEQ ID NO: 3079 - DNA, 50 bp, Artificial sequence
  Synthetic construct
ttctattttcaaagttcacctccgaccactaaaactggacagtaccctgg

SEQ ID NO: 3080 - DNA, 50 bp, Artificial sequence
  Synthetic construct
tctatgtgccattctaaagatccagtcaggagaggggtgccagaaagcct

SEQ ID NO: 3081 - DNA, 50 bp, Artificial sequence
  Synthetic construct
ttgtattcttctttctcctcatatcttacacggtcatcttgatgatgctg

SEQ ID NO: 3082 - DNA, 50 bp, Artificial sequence
  Synthetic construct
ttgtcacgcctctcctcgtccgtaagcagcagcgccaaccccgtcatcta

SEQ ID NO: 3083 - DNA, 50 bp, Artificial sequence
  Synthetic construct
agtcatcctctgccatgttcgtagggcagcttctgaagggaagaacaagg

SEQ ID NO: 3084 - DNA, 50 bp, Artificial sequence
  Synthetic construct
acattggcggtggcacttttaaacggtgacacagcgtggcccgtgatctg

SEQ ID NO: 3085 - DNA, 50 bp, Artificial sequence
  Synthetic construct
attttctttaataatgtgccaacgtggtggacagtgggtggtgctctctg

SEQ ID NO: 3086 - DNA, 50 bp, Artificial sequence
  Synthetic construct
tgtcgatcattgccatagccatgaagtgaaacatggtgctgcacatagcc

SEQ ID NO: 3087 - DNA, 50 bp, Artificial sequence
  Synthetic construct
accctcctggtcatccttatttcttacttcttcatatgcatcaccattca

SEQ ID NO: 3088 - DNA, 50 bp, Artificial sequence
  Synthetic construct
atcatcctgatcaccctgagaacacacttctgccagggccagaacaaggt

SEQ ID NO: 3089 - DNA, 50 bp, Artificial sequence
  Synthetic construct
atgttgtgagcttcaatatctttatagctctcctggttatcttgatatcc

SEQ ID NO: 3090 - DNA, 50 bp, Artificial sequence
  Synthetic construct
gttctacggaaccattgtaggcgtgtactttttcccctcctccactcacc

SEQ ID NO: 3091 - DNA, 50 bp, Artificial sequence
  Synthetic construct
catgtacctgcgagacaacacaggccagtcctccgagggagaccgagtgg

SEQ ID NO: 3092 - DNA, 50 bp, Artificial sequence
  Synthetic construct
cccttagtcagaccaagaagaatccgagtttgatatcctgcttcatattt

SEQ ID NO: 3093 - DNA, 50 bp, Artificial sequence
  Synthetic construct
tctttgtcccttgttcatacctgtatctaagacctctaacctccttcccc

SEQ ID NO: 3094 - DNA, 50 bp, Artificial sequence
  Synthetic construct
cattcgtgtatgtcagcccaggcacagcctactacgggatacccatgagg

SEQ ID NO: 3095 - DNA, 50 bp, Artificial sequence
  Synthetic construct
aaggctatatcaaaagtcaagaagatgccaaacttctaataaaacaaata

SEQ ID NO: 3096 - DNA, 50 bp, Artificial sequence
  Synthetic construct
tcataatgaccccgttttcatgcatcatcatctcttatttaagaatcctc

SEQ ID NO: 3097 - DNA, 50 bp, Artificial sequence
  Synthetic construct
aggctcctctgttaccacagaccgcgtcctcagtctcttctacacagtca

SEQ ID NO: 3098 - DNA, 50 bp, Artificial sequence
  Synthetic construct
tcttactcacttctgacaccactgctgaatctgcttatctacagtttgcg

SEQ ID NO: 3099 - DNA, 50 bp, Artificial sequence
  Synthetic construct
gttcctcctgttcctagtgtccactgtcttgctcatagtctcactgtgct

SEQ ID NO: 3100 - DNA, 50 bp, Artificial sequence
  Synthetic construct
aacagtgaggtactcatgatgcttccccgtgccatgctcccatacctgta

SEQ ID NO: 3101 - DNA, 50 bp, Artificial sequence
  Synthetic construct
gcgtgcattgggatcgggggctgcactctctcttcctggctcacttgtcg

SEQ ID NO: 3102 - DNA, 50 bp, Artificial sequence
  Synthetic construct
actaataatcattgtgggacctggactctggacactacaggaggggacca

SEQ ID NO: 3103 - DNA, 50 bp, Artificial sequence
  Synthetic construct
caagtacatgtcagtgattcaggcttttctcggttctgttccacaattaa

SEQ ID NO: 3104 - DNA, 50 bp, Artificial sequence
  Synthetic construct
gagatctgcatgaaccttgatgcggcctccttcagccaacataaccctgt

SEQ ID NO: 3105 - DNA, 50 bp, Artificial sequence
  Synthetic construct
tcttatttctacttctaaattgtgtgttgagcatgatagggaacttcact

SEQ ID NO: 3106 - DNA, 50 bp, Artificial sequence
  Synthetic construct
ttctgaatcactattactgtgactatgggcctctcgtggagcttgcctgc

SEQ ID NO: 3107 - DNA, 50 bp, Artificial sequence
  Synthetic construct
caagtgctctccgtgcagtacagtgtgataacccccctgctgaaccccct

SEQ ID NO: 3108 - DNA, 50 bp, Artificial sequence
  Synthetic construct
ctccgccatctcatgccaaactcaggttcccccatagagttgatcttctc

SEQ ID NO: 3109 - DNA, 50 bp, Artificial sequence
  Synthetic construct
gacctccatgcctgaccatgtcgtctggtcgctgttcaacaccctcttca

SEQ ID NO: 3110 - DNA, 50 bp, Artificial sequence
  Synthetic construct
tgagaagcagctaccgtacaacgaggactcatacctggctcgcttccagc

SEQ ID NO: 3111 - DNA, 50 bp, Artificial sequence
  Synthetic construct
ctacacttcagctatgttctcttacatgaacccccacagcacacatgggc

SEQ ID NO: 3112 - DNA, 50 bp, Artificial sequence
  Synthetic construct
cctcttttttctcattgtctatcttgtggcttttctcggcaacatgctca

SEQ ID NO: 3113 - DNA, 50 bp, Artificial sequence
  Synthetic construct
caatgaattggtgctttttgttgttagtgttctgtttgttgtcattccac

SEQ ID NO: 3114 - DNA, 50 bp, Artificial sequence
  Synthetic construct
ctacacataatagttgtcatattgggtttgtttgggaccattcagtacag

SEQ ID NO: 3115 - DNA, 50 bp, Artificial sequence
  Synthetic construct
tagccaggccaccaacacagccaccacgttctgcatcttctatagcatgg

SEQ ID NO: 3116 - DNA, 50 bp, Artificial sequence
  Synthetic construct
cattactaataaccttttgcttttcattgtgcctaccccgaataggattg

SEQ ID NO: 3117 - DNA, 50 bp, Artificial sequence
  Synthetic construct
gggcctatgtctgtgtggttagcaatgtcgctgggaatgactccctgagg

SEQ ID NO: 3118 - DNA, 50 bp, Artificial sequence
  Synthetic construct
gttgtcatctttgagacagagaagttgcaaatggggcaaccgcagcagca

SEQ ID NO: 3119 - DNA, 50 bp, Artificial sequence
  Synthetic construct
tgttgcagatcagctccttctgacgtgatcctagtaagagatgaaatagc

SEQ ID NO: 3120 - DNA, 50 bp, Artificial sequence
  Synthetic construct
aacttgtcttccaggaatgattgtgatgcaatgcaaaattaacctggtct

SEQ ID NO: 3121 - DNA, 50 bp, Artificial sequence
  Synthetic construct
ggaaacaacgacaagccagactggaatatgaatgggacctggtggacttt

SEQ ID NO: 3122 - DNA, 50 bp, Artificial sequence
  Synthetic construct
cgagtggacccccacgcgcctgacccaactgcactccctgctgctgagcc

SEQ ID NO: 3123 - DNA, 50 bp, Artificial sequence
  Synthetic construct
aacatgaggcttactggctctctcctatgttcacagttctgcctctgcat

SEQ ID NO: 3124 - DNA, 50 bp, Artificial sequence
  Synthetic construct
tgtaccatgtcctgttcttagtgcttgaatgtcctaacctgaagctgaag

SEQ ID NO: 3125 - DNA, 50 bp, Artificial sequence
  Synthetic construct
gctcttttcacaatcctaaaaaagaagtctgttagaggcgtaaggaaagc

SEQ ID NO: 3126 - DNA, 50 bp, Artificial sequence
  Synthetic construct
aagtgtctgtggtctttactgtcagcccttatgtgccccaggcagaggag

SEQ ID NO: 3127 - DNA, 50 bp, Artificial sequence
  Synthetic construct
tgtgcttgccctgtgtgaaaaggtagaagccagcggcatttctgtgctca

SEQ ID NO: 3128 - DNA, 50 bp, Artificial sequence
  Synthetic construct
cccagaggtttggacgccacattccaccttgtatccacatcccgttggct

SEQ ID NO: 3129 - DNA, 50 bp, Artificial sequence
  Synthetic construct
agaggcttgcgctctttaccttcaccccaatgcctttttccttggctgtg

SEQ ID NO: 3130 - DNA, 50 bp, Artificial sequence
  Synthetic construct
aaaagacacagacaaagtgacattcctgagtctgaagctggaccccaacc

SEQ ID NO: 3131 - DNA, 50 bp, Artificial sequence
  Synthetic construct
ataaatgattgtggaattaaaggagcttgctggatttatgataacatcaa

SEQ ID NO: 3132 - DNA, 50 bp, Artificial sequence
  Synthetic construct
ggagagccgcccttctaccctgctcaccaacctggacagagggacacccg

SEQ ID NO: 3133 - DNA, 50 bp, Artificial sequence
  Synthetic construct
agaataaagggcagtttgctaagagccctctggcacaaatggaagaagaa

SEQ ID NO: 3134 - DNA, 50 bp, Artificial sequence
  Synthetic construct
gggagctgccaagctggatcttgatgtgggacttcagccctagtggcctt

SEQ ID NO: 3135 - DNA, 50 bp, Artificial sequence
  Synthetic construct
aaggcagagattcccatccttcctgacgtagagcagttttggcatgagag

SEQ ID NO: 3136 - DNA, 50 bp, Artificial sequence
  Synthetic construct
tggtgttgagcctacaggcggtggctttctttgtgctgcacttcctcaag

SEQ ID NO: 3137 - DNA, 50 bp, Artificial sequence
  Synthetic construct
tgggatactgttctgggggaggcaacaacaaaatcgcacagacactgcgt

SEQ ID NO: 3138 - DNA, 50 bp, Artificial sequence
  Synthetic construct
tggtgagcacctttgcattatgttacgccctttccttcatcacctacgtt

SEQ ID NO: 3139 - DNA, 50 bp, Artificial sequence
  Synthetic construct
ataagatgcatggttccagaacactttgaaaaaaccatttttctcattgc

SEQ ID NO: 3140 - DNA, 50 bp, Artificial sequence
  Synthetic construct
attgttctaattgtgcttttagccaaagagtcactgaaatcaacagcccc

SEQ ID NO: 3141 - DNA, 50 bp, Artificial sequence
  Synthetic construct
aattccaccttcctacacccaaacttcttcatactgactggctttccagg

SEQ ID NO: 3142 - DNA, 50 bp, Artificial sequence
  Synthetic construct
atgcgcttcttactgcacccattcctatcctcacttccctgctccattac

SEQ ID NO: 3143 - DNA, 50 bp, Artificial sequence
  Synthetic construct
attttgttgggaaaacttatcttctgccaagccaccatcataggccatgc

SEQ ID NO: 3144 - DNA, 50 bp, Artificial sequence
  Synthetic construct
gccttcttactatgcctatccccatactttcttctcgactcagatactgt

SEQ ID NO: 3145 - DNA, 50 bp, Artificial sequence
  Synthetic construct
tcccctgatgtgccagtcttgctcaatgttctccaccatgtcattcctgc

SEQ ID NO: 3146 - DNA, 50 bp, Artificial sequence
  Synthetic construct
ggctgctcagctccaatgtctacagaaaccccttcgccatctacctcctg

SEQ ID NO: 3147 - DNA, 50 bp, Artificial sequence
  Synthetic construct
gagaaccttcgacagtgtggtcttctacctgacgctgatcgtgggcctcg

SEQ ID NO: 3148 - DNA, 50 bp, Artificial sequence
  Synthetic construct
catttggattggagtcccttttttctttgtgtatcttgttgcactcctgg

SEQ ID NO: 3149 - DNA, 50 bp, Artificial sequence
  Synthetic construct
catcattgtgatttccattactcatagtacaggaatgagagttcccctta

SEQ ID NO: 3150 - DNA, 50 bp, Artificial sequence
  Synthetic construct
gtcttcatcctattgtttggttgcctcatggacaggaagatacaagaagc

SEQ ID NO: 3151 - DNA, 50 bp, Artificial sequence
  Synthetic construct
tcaccctgtcccgtgctacagcggtcaaggagcgggggaagaaccggaag

SEQ ID NO: 3152 - DNA, 50 bp, Artificial sequence
  Synthetic construct
ctgtggctgttccggcagcaccaccaggttcctcttgctctggtcaccct

SEQ ID NO: 3153 - DNA, 50 bp, Artificial sequence
  Synthetic construct
agggtttcaaggaaaagttccttcgcaagacccgcgagaatccggtggta

SEQ ID NO: 3154 - DNA, 50 bp, Artificial sequence
  Synthetic construct
ctcattattccttcgtccatcttaccaccccttagcttctgtgagagatt

SEQ ID NO: 3155 - DNA, 50 bp, Artificial sequence
  Synthetic construct
atcccatcgatccaacagagaagacagtcaagagtccactgctgatgcac

SEQ ID NO: 3156 - DNA, 50 bp, Artificial sequence
  Synthetic construct
ccctttggttctgagcagtgtggtgactccattcctcaacccctttatat

SEQ ID NO: 3157 - DNA, 50 bp, Artificial sequence
  Synthetic construct
catctgtgctaatggcatctctgcgttgttgggaccaccttttgcaggta

SEQ ID NO: 3158 - DNA, 50 bp, Artificial sequence
  Synthetic construct
caccatctgcccagtcgatggggcgtggacggagtggagcaagtggtcag

SEQ ID NO: 3159 - DNA, 50 bp, Artificial sequence
  Synthetic construct
cctgccacctgaccctgaccctggatgattacctattcattgcgttcgtg

SEQ ID NO: 3160 - DNA, 50 bp, Artificial sequence
  Synthetic construct
tggtggacaacctcatcaccagcctgcgcgagcagtgctacgaggaggat

SEQ ID NO: 3161 - DNA, 50 bp, Artificial sequence
  Synthetic construct
ttcttttgatatggacaaaatagtttctacattttacactgtggtattcc

SEQ ID NO: 3162 - DNA, 50 bp, Artificial sequence
  Synthetic construct
acaaagatgtgaaagaggcattatgcaaagaactgttcaaaagaaaattg

SEQ ID NO: 3163 - DNA, 50 bp, Artificial sequence
  Synthetic construct
tccacaccgttatcactttccgtctgacttactgtggcccaaacttaatt

SEQ ID NO: 3164 - DNA, 50 bp, Artificial sequence
  Synthetic construct
aggtggaaattgccttccctcactactgacgagaccatgtgtaaaagcgt

SEQ ID NO: 3165 - DNA, 50 bp, Artificial sequence
  Synthetic construct
tggagcttgtcacaggatcatggataggtggaatagttaacacattaatc

SEQ ID NO: 3166 - DNA, 50 bp, Artificial sequence
  Synthetic construct
ttgtcactctgatttatttcatcactttgttggataatttgggtataatt

SEQ ID NO: 3167 - DNA, 50 bp, Artificial sequence
  Synthetic construct
actgatttctcttttctacaccattctgattccaactttgaatcctatta

SEQ ID NO: 3168 - DNA, 50 bp, Artificial sequence
  Synthetic construct
tctgctggcctgcttcacagccgtcttggccttcatctgcctccagttct

SEQ ID NO: 3169 - DNA, 50 bp, Artificial sequence
  Synthetic construct
ggtggggccagcggcatcggaggcatcaccgccgtcatggtcaaccagag

SEQ ID NO: 3170 - DNA, 50 bp, Artificial sequence
  Synthetic construct
ggacgtgggtaggtgggttcttacactccattatccaagtggctctggta

SEQ ID NO: 3171 - DNA, 50 bp, Artificial sequence
  Synthetic construct
accatcatacttcattcctttatgataatgtttgtttactacttttcaag

SEQ ID NO: 3172 - DNA, 50 bp, Artificial sequence
  Synthetic construct
aatctcctatggagtcagcctaaactcccttaaaacttatagtcaggaag

SEQ ID NO: 3173 - DNA, 50 bp, Artificial sequence
  Synthetic construct
gccacagacccagctagattctgagggtccaactctgccagagccgatgg

SEQ ID NO: 3174 - DNA, 50 bp, Artificial sequence
  Synthetic construct
agatgagggattggaagttaatctggacagctactccaagcctcaccacc

SEQ ID NO: 3175 - DNA, 50 bp, Artificial sequence
  Synthetic construct
gctggctatttgtcattgccatgcccgtcctttacaactggtgcctgctg

SEQ ID NO: 3176 - DNA, 50 bp, Artificial sequence
  Synthetic construct
gagaatatggagttatctgatgcatgtcctctttgaccattccaacctgg

SEQ ID NO: 3177 - DNA, 50 bp, Artificial sequence
  Synthetic construct
aatcctcaccctctgtgtcttcttcatttggtgtcctttttccttagcct

SEQ ID NO: 3178 - DNA, 50 bp, Artificial sequence
  Synthetic construct
accgcgccttcccggtctcccactaccgcttctggctcttccacatcctg

SEQ ID NO: 3179 - DNA, 50 bp, Artificial sequence
  Synthetic construct
tggatttggtgctgtcaactgcccatacacttacatgtcttacttcctca

SEQ ID NO: 3180 - DNA, 50 bp, Artificial sequence
  Synthetic construct
ctctgttgtggatgggtctctgttgtggagggtctctgttgtggatggtt

SEQ ID NO: 3181 - DNA, 50 bp, Artificial sequence
  Synthetic construct
tccaccacagataattgcatccaactgacctcagcttttgtgagcagtga

SEQ ID NO: 3182 - DNA, 50 bp, Artificial sequence
  Synthetic construct
gtccagatagctaagttaaaagccaccttagacagtgtaacaaagtggaa

SEQ ID NO: 3183 - DNA, 50 bp, Artificial sequence
  Synthetic construct
cggctgtgggcggcgaggccatctactcggacgagcaggccaagttcact

SEQ ID NO: 3184 - DNA, 50 bp, Artificial sequence
  Synthetic construct
gaatggcatccagatggggaccggagggtcagaattcaaaatccagaaga

SEQ ID NO: 3185 - DNA, 50 bp, Artificial sequence
  Synthetic construct
cctgcaagtcacatttcccagtgaaacactgaacttatcagaaaaatgta

SEQ ID NO: 3186 - DNA, 50 bp, Artificial sequence
  Synthetic construct
tcactggactcagcttctatcaacaaagaaaagagccagtttcagacatt

SEQ ID NO: 3187 - DNA, 50 bp, Artificial sequence
  Synthetic construct
gaagcaacggtcccctgagatcatgtgccagtcttcccgccagccacgtc

SEQ ID NO: 3188 - DNA, 50 bp, Artificial sequence
  Synthetic construct
gattactttatgagtcgctatgagaagaagctagagaactcaaagctaag

SEQ ID NO: 3189 - DNA, 50 bp, Artificial sequence
  Synthetic construct
gttcctagtacagtagcaactacctattttcaactcagtcacatggcagc

SEQ ID NO: 3190 - DNA, 50 bp, Artificial sequence
  Synthetic construct
agacccccagcgtctacgacgagagcgggagcaccggaggtggtgatgac

SEQ ID NO: 3191 - DNA, 50 bp, Artificial sequence
  Synthetic construct
acagaaggccaatgcccacggcttcatcatggaactccaggacggctaca

SEQ ID NO: 3192 - DNA, 50 bp, Artificial sequence
  Synthetic construct
cactattgtgccttcttcctttggttgcttttttattattttgcttacat

SEQ ID NO: 3193 - DNA, 50 bp, Artificial sequence
  Synthetic construct
ccttcagcgactagagagctacaggagaatcaccagtggcaaatgtcccc

SEQ ID NO: 3194 - DNA, 50 bp, Artificial sequence
  Synthetic construct
agttcctacccccacctattccccgcttagccagagggctggcaccactg

SEQ ID NO: 3195 - DNA, 50 bp, Artificial sequence
  Synthetic construct
agaatcagcattacgctagtctctgtgcccttgattgtcagatattttcg

SEQ ID NO: 3196 - DNA, 50 bp, Artificial sequence
  Synthetic construct
aatcatgaagaatcctaaagcgaagaccacaggaatgggtgccatctatg

SEQ ID NO: 3197 - DNA, 50 bp, Artificial sequence
  Synthetic construct
ttatgccaaggcaatagcttaaaaataatctcttcctctttagtggcagg

SEQ ID NO: 3198 - DNA, 50 bp, Artificial sequence
  Synthetic construct
ggagggaggaccacattgccaataaaaggtccctgaattctaaattctgg

SEQ ID NO: 3199 - DNA, 50 bp, Artificial sequence
  Synthetic construct
cagtgaatgacgctgactccgctgacatcagcaccttgctggatgcctcg

SEQ ID NO: 3200 - DNA, 50 bp, Artificial sequence
  Synthetic construct
ttgttcactacttcttccagctttttctcatcccaattatccatagtatc

SEQ ID NO: 3201 - DNA, 50 bp, Artificial sequence
  Synthetic construct
ctacatcccctggaagtacaaggactcatctgtggtccctgcttctcctc

SEQ ID NO: 3202 - DNA, 50 bp, Artificial sequence
  Synthetic construct
accaggatggccctgtccaagttctgacacccacttgccaacccattccg

SEQ ID NO: 3203 - DNA, 50 bp, Artificial sequence
  Synthetic construct
cttccagtcaatgcaagcccagccaggccaactttgagacttgcctccta

SEQ ID NO: 3204 - DNA, 50 bp, Artificial sequence
  Synthetic construct
gaaggatattacacctatttctacaagggccgggactactggaagtttga

SEQ ID NO: 3205 - DNA, 50 bp, Artificial sequence
  Synthetic construct
aatagctcggacgcaatctgtgaggacagggaccccccagccacgcagcc

SEQ ID NO: 3206 - DNA, 50 bp, Artificial sequence
  Synthetic construct
acggcactgactgtgcgacgctcggagccgtccttgtccacctgccagca

SEQ ID NO: 3207 - DNA, 50 bp, Artificial sequence
  Synthetic construct
tctttactaatcatcatactagtcatctttactctcagtggctcaaaatt

SEQ ID NO: 3208 - DNA, 50 bp, Artificial sequence
  Synthetic construct
agaagatacttgcgtgttgagcaccattttcagcaagcccactacgacaa

SEQ ID NO: 3209 - DNA, 50 bp, Artificial sequence
  Synthetic construct
catgcaccgtcatcctcgttattgtcgtgcccatctgcacaatgaaatca

SEQ ID NO: 3210 - DNA, 50 bp, Artificial sequence
  Synthetic construct
gcttttctcgaaagtctacgccgtccacaggctccccctcccagagcagc

SEQ ID NO: 3211 - DNA, 50 bp, Artificial sequence
  Synthetic construct
ctggaagtggcctggcctctatttatcttcctgatcctgatctctgttcg

SEQ ID NO: 3212 - DNA, 50 bp, Artificial sequence
  Synthetic construct
tttggcagcggtgactgtatttttaaattcattgacacccaaattctatg

SEQ ID NO: 3213 - DNA, 50 bp, Artificial sequence
  Synthetic construct
tcccacatcactgccctggctgactacgccatgcggctcatggagcagat

SEQ ID NO: 3214 - DNA, 50 bp, Artificial sequence
  Synthetic construct
tttgggagagactggcctatggcatcacgccagagaacgagcaccacctg

SEQ ID NO: 3215 - DNA, 50 bp, Artificial sequence
  Synthetic construct
gagatggagcccccgccggttatggagtcctcccagcccgcccaggccac

SEQ ID NO: 3216 - DNA, 50 bp, Artificial sequence
  Synthetic construct
ccaagaactccgaatcggctgttgagtgggaggaaacattgaaatccaaa

SEQ ID NO: 3217 - DNA, 50 bp, Artificial sequence
  Synthetic construct
gcctttcaggaggagtactacaggacgggcaccttcccagagacgcccat

SEQ ID NO: 3218 - DNA, 50 bp, Artificial sequence
  Synthetic construct
cagtcactgcacgagtggttcagggacacggatgcggagtttgttgatat

SEQ ID NO: 3219 - DNA, 50 bp, Artificial sequence
  Synthetic construct
tgccgtttcatgtttgtctacatcgtcttcttgttcgggttttccacagc

SEQ ID NO: 3220 - DNA, 50 bp, Artificial sequence
  Synthetic construct
ctggtgccccacgaagaagccgctgctccaggacggaccacagccacccc

SEQ ID NO: 3221 - DNA, 50 bp, Artificial sequence
  Synthetic construct
gcaaggacagaagagagtcccttagtggacatttctagttaccaagctgc

SEQ ID NO: 3222 - DNA, 50 bp, Artificial sequence
  Synthetic construct
gctgccctctgctttcgccgcaacctgggcacctacaaccgcaaatatgc

SEQ ID NO: 3223 - DNA, 50 bp, Artificial sequence
  Synthetic construct
atatgtcggccacgaggtgtttgagaactacttcccctttcagtggaagc

SEQ ID NO: 3224 - DNA, 50 bp, Artificial sequence
  Synthetic construct
ttcttttaacaaagccagtatcatgcaaacacttgataaaatcacacagc

SEQ ID NO: 3225 - DNA, 50 bp, Artificial sequence
  Synthetic construct
gctgacacctgttctcattcgttatgtgtggacactgaactccaccaagt

SEQ ID NO: 3226 - DNA, 50 bp, Artificial sequence
  Synthetic construct
tgggcttcatgggagcagacgctgcctacgctgtgtgaggacccgtcagg

SEQ ID NO: 3227 - DNA, 50 bp, Artificial sequence
  Synthetic construct
gcaccctcttcatcagtctgcgctcctcagaccaccggcaggtgaacagc

SEQ ID NO: 3228 - DNA, 50 bp, Artificial sequence
  Synthetic construct
gagcagcacaaaagcttacgtttgcctttaatcaaatgaaacccaaatcc

SEQ ID NO: 3229 - DNA, 50 bp, Artificial sequence
  Synthetic construct
aggcaatctccttcaaatattattagcaaaatcaaacatagatcaaagta

SEQ ID NO: 3230 - DNA, 50 bp, Artificial sequence
  Synthetic construct
ttagctttgttacatactcattgtaaccactccgaaaagtgctgcttgat

SEQ ID NO: 3231 - DNA, 50 bp, Artificial sequence
  Synthetic construct
tcctgatgatggcaaatgtcttcatttattttattatggaagtctccaaa

SEQ ID NO: 3232 - DNA, 50 bp, Artificial sequence
  Synthetic construct
aggaattacactacatcaatttgaagctaaatcaagtggtgagaaaggtt

SEQ ID NO: 3233 - DNA, 50 bp, Artificial sequence
  Synthetic construct
ctccagtgttcagccctgccaatccagaaagctcaatggaagactgcttg

SEQ ID NO: 3234 - DNA, 50 bp, Artificial sequence
  Synthetic construct
atacctctctagtatgttctgtgactctgctcattacaatcctgtgctct

SEQ ID NO: 3235 - DNA, 50 bp, Artificial sequence
  Synthetic construct
accaggagcctcgacacacttgggactcaagggcttgcaccccacccagc

SEQ ID NO: 3236 - DNA, 50 bp, Artificial sequence
  Synthetic construct
actgtgatgttaactctctgtgtgctttattactggctcttccccgctcg

SEQ ID NO: 3237 - DNA, 50 bp, Artificial sequence
  Synthetic construct
ccaggtcagagctacggaagcatggtccgttcaccaacgccacgtttcta

SEQ ID NO: 3238 - DNA, 50 bp, Artificial sequence
  Synthetic construct
cggaactaccggctctttctacacagtgttgcatccgctttactgggcgt

SEQ ID NO: 3239 - DNA, 50 bp, Artificial sequence
  Synthetic construct
actgttctccctacagcattgtggagttgcttgaatccgacaatatctca

SEQ ID NO: 3240 - DNA, 50 bp, Artificial sequence
  Synthetic construct
gtctccatcatgaatgctgacattctcaactactgccagaaggagtcctg

SEQ ID NO: 3241 - DNA, 50 bp, Artificial sequence
  Synthetic construct
cctaaccccccaagtcagcagagcaccctctaccgtccccccagcagcct

SEQ ID NO: 3242 - DNA, 50 bp, Artificial sequence
  Synthetic construct
agctaccgttctcacctttctggatagccactgcgaagtgaacaccgagt

SEQ ID NO: 3243 - DNA, 50 bp, Artificial sequence
  Synthetic construct
gtcctggttgtcccagtgacccctatcccaaccttccagctccgccctca

SEQ ID NO: 3244 - DNA, 50 bp, Artificial sequence
  Synthetic construct
gaacgccttcctgtaccacatgggccaacacagcaacaaattcatgctgg

SEQ ID NO: 3245 - DNA, 50 bp, Artificial sequence
  Synthetic construct
ggtaactcatccacgttacttgaagaactccctggtttaccacccacagc

SEQ ID NO: 3246 - DNA, 50 bp, Artificial sequence
  Synthetic construct
ggagagcgaggcacagtggggccgtccggtgaacctggcgtgaaggggga

SEQ ID NO: 3247 - DNA, 50 bp, Artificial sequence
  Synthetic construct
agttacagcgagctgcttactatcagaaaaaatctcgcaagaagatgtgt

SEQ ID NO: 3248 - DNA, 50 bp, Artificial sequence
  Synthetic construct
gtaaagggaagtaactatcatctttctgacaatgatgcttctgatgtgga

SEQ ID NO: 3249 - DNA, 50 bp, Artificial sequence
  Synthetic construct
tcccttttctcgccatagcctattggattgctccgtgcagcaagctagga

SEQ ID NO: 3250 - DNA, 50 bp, Artificial sequence
  Synthetic construct
acgacatcatccccgaagcccagatcagtggtaatgggaaactggcatcc

SEQ ID NO: 3251 - DNA, 50 bp, Artificial sequence
  Synthetic construct
ctggccgtcaacatctacatcgagcgcagccgcgaggcgcactgccagtc

SEQ ID NO: 3252 - DNA, 50 bp, Artificial sequence
  Synthetic construct
caagaaggatgtgtttggcctgaggcgggaaatccccattcccagcacag

SEQ ID NO: 3253 - DNA, 50 bp, Artificial sequence
  Synthetic construct
tgaagagacaggggacacgctctatgccccctattccacacattttcagc

SEQ ID NO: 3254 - DNA, 50 bp, Artificial sequence
  Synthetic construct
ggaagagccggagcctggagaagcggatgctgatcccctcggaggacctg

SEQ ID NO: 3255 - DNA, 50 bp, Artificial sequence
  Synthetic construct
ggaagtcgtgaacaaacaatctgtgcgtgttattcctgcccctgggacct

SEQ ID NO: 3256 - DNA, 50 bp, Artificial sequence
  Synthetic construct
ttgattcgattcatagaggagctgaaaggtggaacaaaaaaggggaagcc

SEQ ID NO: 3257 - DNA, 50 bp, Artificial sequence
  Synthetic construct
gttggaaaaaattgcatcaagaagtcagaatataattgaaatcaacattt

SEQ ID NO: 3258 - DNA, 50 bp, Artificial sequence
  Synthetic construct
ctacgtcgtgatcggcgacttggggtccaacttctttgcccggctgttcg

SEQ ID NO: 3259 - DNA, 50 bp, Artificial sequence
  Synthetic construct
tgcactcttctttatcatctcagacctgaccatcgccctcaacaaattct

SEQ ID NO: 3260 - DNA, 50 bp, Artificial sequence
  Synthetic construct
cgtgttgtacctgctttcccggctgcctcagatccgcaccaacttcctcc

SEQ ID NO: 3261 - DNA, 50 bp, Artificial sequence
  Synthetic construct
tgcctctatcattcctccctatctacactaacatcccacgctctgaacgc

SEQ ID NO: 3262 - DNA, 50 bp, Artificial sequence
  Synthetic construct
ccatttttcattacatcgactccctgaacagacagaagagtccagcctca

SEQ ID NO: 3263 - DNA, 50 bp, Artificial sequence
  Synthetic construct
gtgcctactctgcccactcctccatcagtgtgttctggttcccacgcgag

SEQ ID NO: 3264 - DNA, 50 bp, Artificial sequence
  Synthetic construct
ctgggccaagtttaccaactctgacactcccacctccttcaaccacatgg

SEQ ID NO: 3265 - DNA, 50 bp, Artificial sequence
  Synthetic construct
gacatgcttccgtgtctggagggggaaggctgcgacttgttaatcaaccg

SEQ ID NO: 3266 - DNA, 50 bp, Artificial sequence
  Synthetic construct
ccatcggcttctatgcagcctacatgtttgttcgcaagatctatgctgct

SEQ ID NO: 3267 - DNA, 50 bp, Artificial sequence
  Synthetic construct
ggccattaatcccatcaacaccttcaccaagttccttctggatcaccaag

SEQ ID NO: 3268 - DNA, 50 bp, Artificial sequence
  Synthetic construct
ttagaattgcttggccttgacagcctcaagctcagagttgatatgaaagt

SEQ ID NO: 3269 - DNA, 50 bp, Artificial sequence
  Synthetic construct
catggaagcagtcacatccgccactattcgctgtaccaaagacggcaggt

SEQ ID NO: 3270 - DNA, 50 bp, Artificial sequence
  Synthetic construct
gccggagatagcccaggccacgagcagccggacagtggtgtacaacaagg

SEQ ID NO: 3271 - DNA, 50 bp, Artificial sequence
  Synthetic construct
ctgaatttctttgtcaccgaatgtaagtatctttttagtgcttctatgcg

SEQ ID NO: 3272 - DNA, 50 bp, Artificial sequence
  Synthetic construct
ggtggacctgctagaaattgggggcagccagaacctgcgcttctactgga

SEQ ID NO: 3273 - DNA, 50 bp, Artificial sequence
  Synthetic construct
gaaacgcacctgacttaaataacatgtattgtggatatataaatagacta

SEQ ID NO: 3274 - DNA, 50 bp, Artificial sequence
  Synthetic construct
cggagagtgtacgattttgtgggactgttggtgagccccgaaatggagca

SEQ ID NO: 3275 - DNA, 50 bp, Artificial sequence
  Synthetic construct
gagggtggcgagggtcagttcaatgaagacggctccttcatcggccagta

SEQ ID NO: 3276 - DNA, 50 bp, Artificial sequence
  Synthetic construct
ggaagccagggagctgcctgctgctgctgctgctgctgctgctgctgctg

SEQ ID NO: 3277 - DNA, 50 bp, Artificial sequence
  Synthetic construct
aactgtgcccccctccagccatgagacaggcttcatccagtatttggatt

SEQ ID NO: 3278 - DNA, 50 bp, Artificial sequence
  Synthetic construct
cgcatcattggagtcaaggttcacccaggtcagagaaaagagcagatcct

SEQ ID NO: 3279 - DNA, 50 bp, Artificial sequence
  Synthetic construct
ttagcattgtactgtttgttatgcccagaagacaaagttgcctttgaatt

SEQ ID NO: 3280 - DNA, 50 bp, Artificial sequence
  Synthetic construct
cccttcgatgactcactgctggaggaggacttccctgacacccagaggat

SEQ ID NO: 3281 - DNA, 50 bp, Artificial sequence
  Synthetic construct
actggcaggctgtgtattccttcgctgtccagcttcgaccaggattcaga

SEQ ID NO: 3282 - DNA, 50 bp, Artificial sequence
  Synthetic construct
gcggtaaagagtccttgattggttatagaccaacagaagattccaaagaa

SEQ ID NO: 3283 - DNA, 50 bp, Artificial sequence
  Synthetic construct
caagctcctctacgccaaggagattcctgagtaccggaagatcgtgcagc

SEQ ID NO: 3284 - DNA, 50 bp, Artificial sequence
  Synthetic construct
ccctcacctagagagctgcgcttgcgcctagaagctgccattaaaactgc

SEQ ID NO: 3285 - DNA, 50 bp, Artificial sequence
  Synthetic construct
ccctcttctccctggatgtggtagtgaacttgagactccagctctctgtg

SEQ ID NO: 3286 - DNA, 50 bp, Artificial sequence
  Synthetic construct
ctctgggtgtgcgggcggcctggcgcggcgctccgatggagtctagttct

SEQ ID NO: 3287 - DNA, 50 bp, Artificial sequence
  Synthetic construct
ctgtaacccgtacaacaatctgatcttcatctggggcaacttcctcctgc

SEQ ID NO: 3288 - DNA, 50 bp, Artificial sequence
  Synthetic construct
gaaaaggtgggactctctgaaagtgaagttgagccatcggaagagaacag

SEQ ID NO: 3289 - DNA, 50 bp, Artificial sequence
  Synthetic construct
caccaaattatctatgttggaactacacggaaacccctttgaatgcacct

SEQ ID NO: 3290 - DNA, 50 bp, Artificial sequence
  Synthetic construct
acgctttccatcaccaggtgcatgatgacgatcttttgtcttcttctgaa

SEQ ID NO: 3291 - DNA, 50 bp, Artificial sequence
  Synthetic construct
ctagtgacaatggttctaaaatccaaaactttgtattagaatgggatgaa

SEQ ID NO: 3292 - DNA, 50 bp, Artificial sequence
  Synthetic construct
tgaagacccccaggcagtgacgtatgccgaggtgaaacactccagaccta

SEQ ID NO: 3293 - DNA, 50 bp, Artificial sequence
  Synthetic construct
tgagatgaagtcgagggagcctaaggaccaggaggccccaagcaccacgg

SEQ ID NO: 3294 - DNA, 50 bp, Artificial sequence
  Synthetic construct
tccgagtagcatattatgcaaaatggatacacaaaattattttaacatat

SEQ ID NO: 3295 - DNA, 50 bp, Artificial sequence
  Synthetic construct
agcaaacctgtgacttccaacatcactacgcttccacagagcatttcaag

SEQ ID NO: 3296 - DNA, 50 bp, Artificial sequence
  Synthetic construct
gagaaatggcatggagcacaatgaagcaagaacaaagcacaagagtgaag

SEQ ID NO: 3297 - DNA, 50 bp, Artificial sequence
  Synthetic construct
tggaataccatcgcctagatcagaatgttaatgaggcaatgccttctttg

SEQ ID NO: 3298 - DNA, 50 bp, Artificial sequence
  Synthetic construct
ccactgaatcgctggactgtgaagtcaacaataatggcagtaacagggca

SEQ ID NO: 3299 - DNA, 50 bp, Artificial sequence
  Synthetic construct
cttctcatgcacccggatgctctggaagagcctgatgaccagaaccgtat

SEQ ID NO: 3300 - DNA, 50 bp, Artificial sequence
  Synthetic construct
gcctacactttcagtgaacccttccacctgattgtgtcctatgactggct

SEQ ID NO: 3301 - DNA, 50 bp, Artificial sequence
  Synthetic construct
ggtaaccccagccccaagccaggaggacgactgtgtctttgggccactgc

SEQ ID NO: 3302 - DNA, 50 bp, Artificial sequence
  Synthetic construct
aatggaacaaaactctaactttaggaatggctttggtttcagccttcagt

SEQ ID NO: 3303 - DNA, 50 bp, Artificial sequence
  Synthetic construct
cagagcacaggtagtgaagtcgaagaaaatcccccatttcagaataattt

SEQ ID NO: 3304 - DNA, 50 bp, Artificial sequence
  Synthetic construct
tgcaacaaccaatcagaaccataagctacaggcacgcactgaagcacttt

SEQ ID NO: 3305 - DNA, 50 bp, Artificial sequence
  Synthetic construct
ggtgacatatgcacagttggatcactgcgttttcacacagacaaaaatca

SEQ ID NO: 3306 - DNA, 50 bp, Artificial sequence
  Synthetic construct
cgggactaaaattgggctgttccttcaagtagcacctctatcagttatgg

SEQ ID NO: 3307 - DNA, 50 bp, Artificial sequence
  Synthetic construct
gagtacgtggtccacactatcttcccctccaacggcagcagcctctgcaa

SEQ ID NO: 3308 - DNA, 50 bp, Artificial sequence
  Synthetic construct
gacttcccacgctggggtgactacgaggacaagcgggacctgaactacat

SEQ ID NO: 3309 - DNA, 50 bp, Artificial sequence
  Synthetic construct
tgacgccgactcttcccttgaaagtcccgaagaaaataaccccctcagac

SEQ ID NO: 3310 - DNA, 50 bp, Artificial sequence
  Synthetic construct
agcgatatgctcccccagggactccatgtaccagtctgtgtgtttgatat

SEQ ID NO: 3311 - DNA, 50 bp, Artificial sequence
  Synthetic construct
gggagggagagggcggaaggacagacaagtaaactgctgacgatgcagag

SEQ ID NO: 3312 - DNA, 50 bp, Artificial sequence
  Synthetic construct
aacaaatgttaatacatttagccaagaaatccacaagtaaagtactctta

SEQ ID NO: 3313 - DNA, 50 bp, Artificial sequence
  Synthetic construct
tgctcacagttcggtcctcaactttgccactaacagagacgactttgtgc

SEQ ID NO: 3314 - DNA, 50 bp, Artificial sequence
  Synthetic construct
tatgttgatgaggcaccattgccattcccaggacacacgcttattgccgt

SEQ ID NO: 3315 - DNA, 50 bp, Artificial sequence
  Synthetic construct
aagaatctaaagcaaacattgaaagtaaacgacccaaagcaaagagtgtc

SEQ ID NO: 3316 - DNA, 50 bp, Artificial sequence
  Synthetic construct
cattaatacagaggcacaacaattcttccctgaatacaagaactcagaaa

SEQ ID NO: 3317 - DNA, 50 bp, Artificial sequence
  Synthetic construct
aactgaagctgccttggacatcaagggatgccggagcagagacttacgcc

SEQ ID NO: 3318 - DNA, 50 bp, Artificial sequence
  Synthetic construct
tactcacaaaactggtgcagattgagcggctggatgctgtggagtccttg

SEQ ID NO: 3319 - DNA, 50 bp, Artificial sequence
  Synthetic construct
gacttatgctcaaagctcaaaatgtaacaaggtacataaaacttggtcat

SEQ ID NO: 3320 - DNA, 50 bp, Artificial sequence
  Synthetic construct
ggaatagctgcacaacctctttatgctggatattgtaaccatgagaacat

SEQ ID NO: 3321 - DNA, 50 bp, Artificial sequence
  Synthetic construct
ttccagctcacagattggtgctctcctctgtctcagactattttgctgcc

SEQ ID NO: 3322 - DNA, 50 bp, Artificial sequence
  Synthetic construct
ttctcttaggtttcctgtaccgctactacacatcggaaagcaaatcctcc

SEQ ID NO: 3323 - DNA, 50 bp, Artificial sequence
  Synthetic construct
ctgctgcgagtgaagtacctcctggtgtattcacagaagccacccaagag

SEQ ID NO: 3324 - DNA, 50 bp, Artificial sequence
  Synthetic construct
ctcagttgctgaatcactcagctctttagattccatcagctcaaactctg

SEQ ID NO: 3325 - DNA, 50 bp, Artificial sequence
  Synthetic construct
gccccactgaaacctcaagctgttcaggtgccgcccctactgtggagatg

SEQ ID NO: 3326 - DNA, 50 bp, Artificial sequence
  Synthetic construct
agacgaaccttcctactgggctccggtgtttggaaccaacatctatgcag

SEQ ID NO: 3327 - DNA, 50 bp, Artificial sequence
  Synthetic construct
aaccatcttcttcaccatctctggtctcatccattacgcaccagtgttca

SEQ ID NO: 3328 - DNA, 50 bp, Artificial sequence
  Synthetic construct
agcgacccggaaacagcgtatcactgagaccgagtcgccttatcaggagc

SEQ ID NO: 3329 - DNA, 50 bp, Artificial sequence
  Synthetic construct
gtattttgttttgtctgttgagcagtatttagaactttctgacagtgcca

SEQ ID NO: 3330 - DNA, 50 bp, Artificial sequence
  Synthetic construct
ctgaagcagcaggactacctgtctctgcccccttgggaggtcaacaagcc

SEQ ID NO: 3331 - DNA, 50 bp, Artificial sequence
  Synthetic construct
aagcctgagccgtccttctcagagtacgccagcgtccaggtcccgaggaa

SEQ ID NO: 3332 - DNA, 50 bp, Artificial sequence
  Synthetic construct
ctgttgtgtcccaaggggaatcacacctcaatgtctcatggagaagcagt

SEQ ID NO: 3333 - DNA, 50 bp, Artificial sequence
  Synthetic construct
tccatgctccattaattcccgacaatttttgattcctcctaaagatgaag

SEQ ID NO: 3334 - DNA, 50 bp, Artificial sequence
  Synthetic construct
ccacacggcaaccgtccgatcccatgctgagaaccccacagcctcccacg

SEQ ID NO: 3335 - DNA, 50 bp, Artificial sequence
  Synthetic construct
tgcctgaagcgccattatgctgcctttccattacctagcagaacctcctt

SEQ ID NO: 3336 - DNA, 50 bp, Artificial sequence
  Synthetic construct
gcccacagagaatcatgcctccccatctcctgtgccagaaatgcccactc

SEQ ID NO: 3337 - DNA, 50 bp, Artificial sequence
  Synthetic construct
agctcccagggcttgtacggccttcaccccgaccatttgcccaggacaga

SEQ ID NO: 3338 - DNA, 50 bp, Artificial sequence
  Synthetic construct
caagatgaccatgctgactgtcatagagcagccagtacctccaacaccag

SEQ ID NO: 3339 - DNA, 50 bp, Artificial sequence
  Synthetic construct
ggtgccatcaacaaaaatggtcttcaagcctcaagctgtgaagttccttt

SEQ ID NO: 3340 - DNA, 50 bp, Artificial sequence
  Synthetic construct
actctgcctttgataaccctgattactggcatagcaggcttttccccaag

SEQ ID NO: 3341 - DNA, 50 bp, Artificial sequence
  Synthetic construct
gctccactacgctgtcctacacttccacaaggtgcaacctcaggaaccaa

SEQ ID NO: 3342 - DNA, 50 bp, Artificial sequence
  Synthetic construct
aggcccagtggcggccagaggagtccgaggactatgaaaccactatcagc

SEQ ID NO: 3343 - DNA, 50 bp, Artificial sequence
  Synthetic construct
gttgaatataaccaatatctgggtcctggactactttggtggaccaaaaa

SEQ ID NO: 3344 - DNA, 50 bp, Artificial sequence
  Synthetic construct
gcaacaggcgatggctctcctgggcgtaagggatcaggaagtgagcggct

SEQ ID NO: 3345 - DNA, 50 bp, Artificial sequence
  Synthetic construct
gacctgattcagaacgcaagtgatgacgaggccggtgatgccggggacct

SEQ ID NO: 3346 - DNA, 50 bp, Artificial sequence
  Synthetic construct
cctgaccacgaccacaccacaggccaaggccactttgtgctcctggaccc

SEQ ID NO: 3347 - DNA, 50 bp, Artificial sequence
  Synthetic construct
aacaaggactccactgaggccacagttacctacgtcaacctagagagact

SEQ ID NO: 3348 - DNA, 50 bp, Artificial sequence
  Synthetic construct
ggggaggatgactatcccatcgtgaggctgctccgagaaccagtccatgt

SEQ ID NO: 3349 - DNA, 50 bp, Artificial sequence
  Synthetic construct
aataactatagaagtcccatctctaccagtcaacctaccaatcaatccat

SEQ ID NO: 3350 - DNA, 50 bp, Artificial sequence
  Synthetic construct
tccaggcaatgcgaacccaaatgcagcagatgcacggcagaatggttccc

SEQ ID NO: 3351 - DNA, 50 bp, Artificial sequence
  Synthetic construct
caaggggcacgatggcctttaccagggtctcagtacagccaccaaggaca

SEQ ID NO: 3352 - DNA, 50 bp, Artificial sequence
  Synthetic construct
taatgattggcttgacattctacgttttgtcattgtcctggctatcctgg

SEQ ID NO: 3353 - DNA, 50 bp, Artificial sequence
  Synthetic construct
tggaacattctttgatactaaataacctaaaaacattattgtggaagaaa

SEQ ID NO: 3354 - DNA, 50 bp, Artificial sequence
  Synthetic construct
agcttacagctaacatagtgaaattagaaaagatacaaaataacttacag

SEQ ID NO: 3355 - DNA, 50 bp, Artificial sequence
  Synthetic construct
actactctgatgagccctgcataggacaggagtaccagatcatcgcccag

SEQ ID NO: 3356 - DNA, 50 bp, Artificial sequence
  Synthetic construct
gagatgtgtgacggctgcaaaccaggtgtttttttctgaggctgtgttga

SEQ ID NO: 3357 - DNA, 50 bp, Artificial sequence
  Synthetic construct
cttggtgattctaatagtccttgtgttatggtttaagaagcactgctcat

SEQ ID NO: 3358 - DNA, 50 bp, Artificial sequence
  Synthetic construct
gaagtctgttatccctaagcatccgggcgctgtgaatgatgggaggaaaa

SEQ ID NO: 3359 - DNA, 50 bp, Artificial sequence
  Synthetic construct
ccaggaaccaggagacttacgagactctgaagcatgagaaaccaccacag

SEQ ID NO: 3360 - DNA, 50 bp, Artificial sequence
  Synthetic construct
gacagtgacgacttagaagcccctctgatgctatcgtctcatctggaaga

SEQ ID NO: 3361 - DNA, 50 bp, Artificial sequence
  Synthetic construct
gacccatctcccagggtcaccagcatgaatgctcggcaggcagctcccaa

SEQ ID NO: 3362 - DNA, 50 bp, Artificial sequence
  Synthetic construct
gcaggtgtggacgggacagtgagtggctgggaggaagccagaatcaacag

SEQ ID NO: 3363 - DNA, 50 bp, Artificial sequence
  Synthetic construct
tctcccctggaccccggattgctgctcagattggagactcagtcatgttg

SEQ ID NO: 3364 - DNA, 50 bp, Artificial sequence
  Synthetic construct
gcaccgctcaagcgtgatgaaacagttcctggaaactgccattaacctcc

SEQ ID NO: 3365 - DNA, 50 bp, Artificial sequence
  Synthetic construct
atctccaggatgttggctggtttcttcataaactctctcaacagatacta

SEQ ID NO: 3366 - DNA, 50 bp, Artificial sequence
  Synthetic construct
atatctgacttaggcatactgcttccagaggtgtgtatggccccagagga

SEQ ID NO: 3367 - DNA, 50 bp, Artificial sequence
  Synthetic construct
gttcatctataaagcaatgcttagcttggtcagcactaaagaaaatggaa

SEQ ID NO: 3368 - DNA, 50 bp, Artificial sequence
  Synthetic construct
tggcaccaagactggcagaaggaaccaaggaagtatgaaaatgcaattga

SEQ ID NO: 3369 - DNA, 50 bp, Artificial sequence
  Synthetic construct
aagattcaaggtacatcatgcagttcaacaagctattgaacaaaatctgg

SEQ ID NO: 3370 - DNA, 50 bp, Artificial sequence
  Synthetic construct
gtatccagatatggacactgagtcccgtcttttccttacggattttttcc

SEQ ID NO: 3371 - DNA, 50 bp, Artificial sequence
  Synthetic construct
cgccgcgagaccgaggtctatgcctgcatcgagaatgaggatggcagctc

SEQ ID NO: 3372 - DNA, 50 bp, Artificial sequence
  Synthetic construct
ctcaacaatcacaactgcatttccacctgtatcatccactaccctgtttg

SEQ ID NO: 3373 - DNA, 50 bp, Artificial sequence
  Synthetic construct
atggtggctgagttccatgaccaggtgcccttcgacggcatgtggattag

SEQ ID NO: 3374 - DNA, 50 bp, Artificial sequence
  Synthetic construct
gtggaaggacagaagagtaaccggaaggattactcgctgacgatgcagag

SEQ ID NO: 3375 - DNA, 50 bp, Artificial sequence
  Synthetic construct
agcctctgcttcaggtcatcaagagccgctgccactggtcctccgtttac

SEQ ID NO: 3376 - DNA, 50 bp, Artificial sequence
  Synthetic construct
tagcactatatctagggaaacaagtttttttcacaatggataactttgag

SEQ ID NO: 3377 - DNA, 50 bp, Artificial sequence
  Synthetic construct
atgtacagcaatgtaaatcctggagatagcaacccgatttattcccagat

SEQ ID NO: 3378 - DNA, 50 bp, Artificial sequence
  Synthetic construct
gaactcttttgatgagcaaaatgaaataagtggtcggtattcttggaact

SEQ ID NO: 3379 - DNA, 50 bp, Artificial sequence
  Synthetic construct
cgccttcggcgtttgctgcaacgacgagagctgcgtgaccgagcccgagt

SEQ ID NO: 3380 - DNA, 50 bp, Artificial sequence
  Synthetic construct
tgcacctaccgtgatgtgcgcttcgagtccatccggctccctggctgccc

SEQ ID NO: 3381 - DNA, 50 bp, Artificial sequence
  Synthetic construct
ttcagccataatgaaggcactctcagttcaggcttcctacaagaaaaggt

SEQ ID NO: 3382 - DNA, 50 bp, Artificial sequence
  Synthetic construct
gacctgcgataaacggaagcgcctcctgcgagaccagaccgggggagtcc

SEQ ID NO: 3383 - DNA, 50 bp, Artificial sequence
  Synthetic construct
ccacaccagagagatgtaggtcagcaattcctcagtgcaatcaccccagg

SEQ ID NO: 3384 - DNA, 50 bp, Artificial sequence
  Synthetic construct
gccccccaaagcgacccccgtgtccgaaacctgcgattgtcagtgcgagc

SEQ ID NO: 3385 - DNA, 50 bp, Artificial sequence
  Synthetic construct
cccaccacaaaacaagtccgattccaaggctggagcagctaacaccctca

SEQ ID NO: 3386 - DNA, 50 bp, Artificial sequence
  Synthetic construct
cacctgtctgtatgcctctggcaccacgcccgtgccccagctcccgctgc

SEQ ID NO: 3387 - DNA, 50 bp, Artificial sequence
  Synthetic construct
gaaatgctgagagaggtggggcagaggctcagactggaactggctgacac

SEQ ID NO: 3388 - DNA, 50 bp, Artificial sequence
  Synthetic construct
ttgggggggtctggtttaatctcacggcccaggattacgtcatccagttt

SEQ ID NO: 3389 - DNA, 50 bp, Artificial sequence
  Synthetic construct
gggaccaccttcacatacgcacgcaggggcaactgggagaacctcacgtc

SEQ ID NO: 3390 - DNA, 50 bp, Artificial sequence
  Synthetic construct
gcgaacctggtcaccagagccccaactgcatcctgttcatcgagaacctc

SEQ ID NO: 3391 - DNA, 50 bp, Artificial sequence
  Synthetic construct
ccaggccctggatagagatggaaatctggtagaagattttgtatttgatg

SEQ ID NO: 3392 - DNA, 50 bp, Artificial sequence
  Synthetic construct
tacctttgctgtgatggcacaccagaatgaaaaccctgctgtgaggccac

SEQ ID NO: 3393 - DNA, 50 bp, Artificial sequence
  Synthetic construct
acaacttccaaactgaagctatctgtctggtcacctgcaaaaaataccat

SEQ ID NO: 3394 - DNA, 50 bp, Artificial sequence
  Synthetic construct
ctggtgcgactgcggagccagcgggaaccggcgtgaggactgcgaagcct

SEQ ID NO: 3395 - DNA, 50 bp, Artificial sequence
  Synthetic construct
ggctttcggagtgtagagccagaggggatgggacaggtgccctgctgctg

SEQ ID NO: 3396 - DNA, 50 bp, Artificial sequence
  Synthetic construct
agtgcgaaggtgtccgcccaggtgtttcaggagtgcggcccccccgaccc

SEQ ID NO: 3397 - DNA, 50 bp, Artificial sequence
  Synthetic construct
ggcctacacggtcctcctatacggaaacggtccaggctatgtgctcaagg

SEQ ID NO: 3398 - DNA, 50 bp, Artificial sequence
  Synthetic construct
caccgtcatttcccactccgtggcgatgctgatcctcataggctccctgg

SEQ ID NO: 3399 - DNA, 50 bp, Artificial sequence
  Synthetic construct
tcctggccttcggacctgatttcaaatccaacttcagagctgctcctatc

SEQ ID NO: 3400 - DNA, 50 bp, Artificial sequence
  Synthetic construct
acgcagtgaaacgggacctcttaccaccgcgcaccccaccttaccaagtg

SEQ ID NO: 3401 - DNA, 50 bp, Artificial sequence
  Synthetic construct
tggagcacatcgacggctcctccctgagcccccgttcttctctgtgtctt

SEQ ID NO: 3402 - DNA, 50 bp, Artificial sequence
  Synthetic construct
gcgttctccccacaggcatcagcgactgctatggggccgaccctgccttc

SEQ ID NO: 3403 - DNA, 50 bp, Artificial sequence
  Synthetic construct
cggccacaaccctcagaggaccgcttgccttcccagcaggggctggcgga

SEQ ID NO: 3404 - DNA, 50 bp, Artificial sequence
  Synthetic construct
agaggaggccacatgctgaccagcctgatgaggcaagagcctgcccctgc

SEQ ID NO: 3405 - DNA, 50 bp, Artificial sequence
  Synthetic construct
gaggcggcagctcggaaaatccccaaagtaggacatacttttttccaaaa

SEQ ID NO: 3406 - DNA, 50 bp, Artificial sequence
  Synthetic construct
ctcctgaacaacgggctctggaatggcatctcctgcacctcctccttcat

SEQ ID NO: 3407 - DNA, 50 bp, Artificial sequence
  Synthetic construct
gatgatttgcattctttatgagcctctcatggtccagctcacctcaactg

SEQ ID NO: 3408 - DNA, 50 bp, Artificial sequence
  Synthetic construct
ttacctggacgagattcccccgaagttctccatgaagcgcctcaccgccg

SEQ ID NO: 3409 - DNA, 50 bp, Artificial sequence
  Synthetic construct
ttactctctgccactacaagatgctgtacgctcaccttgtatttttcctt

SEQ ID NO: 3410 - DNA, 50 bp, Artificial sequence
  Synthetic construct
gctgacaactgcgtgtccagtccttcagaaggcatcaggaaggcaaagaa

SEQ ID NO: 3411 - DNA, 50 bp, Artificial sequence
  Synthetic construct
tgctgttcctcttccaagatccccttccgatcccgctcccccagtgatgt

SEQ ID NO: 3412 - DNA, 50 bp, Artificial sequence
  Synthetic construct
acaaatatagtcatgtgtagtataataacatttccgtcagggactaactg

SEQ ID NO: 3413 - DNA, 50 bp, Artificial sequence
  Synthetic construct
actgagaacattctgtttgatcttcggtctcggagcagtttgggggcttg

SEQ ID NO: 3414 - DNA, 50 bp, Artificial sequence
  Synthetic construct
actacagcttcaacattgtctgcttgggactcaccaccttggtcagcctg

SEQ ID NO: 3415 - DNA, 50 bp, Artificial sequence
  Synthetic construct
tctcattcagtctactttcatcaaagttcaataacgacgacagtgtggca

SEQ ID NO: 3416 - DNA, 50 bp, Artificial sequence
  Synthetic construct
ttgacgccttctaccaggcccactacggggaacaactggagcgggaacgg

SEQ ID NO: 3417 - DNA, 50 bp, Artificial sequence
  Synthetic construct
gccctactgatggaggctctctacctcgtccgaatcagacagaagaaagc

SEQ ID NO: 3418 - DNA, 50 bp, Artificial sequence
  Synthetic construct
gacaaaaaatgagtattttgaacttaaagctaatttacatgctgaacctg

SEQ ID NO: 3419 - DNA, 50 bp, Artificial sequence
  Synthetic construct
accatgacctcttagtgaaagtgaaagttataaaactagtgaacaaattc

SEQ ID NO: 3420 - DNA, 50 bp, Artificial sequence
  Synthetic construct
gggaactacagaaggctctgccgtctgtgtcttcacaatgaaggatgtgc

SEQ ID NO: 3421 - DNA, 50 bp, Artificial sequence
  Synthetic construct
gctgtacaaagaagacagaagccacgttcccatcttccacggcagaatat

SEQ ID NO: 3422 - DNA, 50 bp, Artificial sequence
  Synthetic construct
caacttgaaattgctttgctggtttcatatttatttgttgtatttaaaaa

SEQ ID NO: 3423 - DNA, 50 bp, Artificial sequence
  Synthetic construct
ttgtgtatcctttcaataattctccttggaacagctatttttgcatttgc

SEQ ID NO: 3424 - DNA, 50 bp, Artificial sequence
  Synthetic construct
tgttgtggaacaaaggaagagtgagtattttgaactgaaggcgaaactgc

SEQ ID NO: 3425 - DNA, 50 bp, Artificial sequence
  Synthetic construct
ttggatcactgcattttcacacagagaaaaatcactggcccttctcagag

SEQ ID NO: 3426 - DNA, 50 bp, Artificial sequence
  Synthetic construct
agtcagtttccaggtgaagagaagcctcaggcaagccccgaaggccgtcc

SEQ ID NO: 3427 - DNA, 50 bp, Artificial sequence
  Synthetic construct
atccaacatcaaggttctgcccacatggtccaccccggtgcagccaatgg

SEQ ID NO: 3428 - DNA, 50 bp, Artificial sequence
  Synthetic construct
ccttgcagcagttagttcggggttgtttttttatagctttctcctcacag

SEQ ID NO: 3429 - DNA, 50 bp, Artificial sequence
  Synthetic construct
acccctgctacaaaaagagtgagctgcacaagttcatgcccaacaaccag

SEQ ID NO: 3430 - DNA, 50 bp, Artificial sequence
  Synthetic construct
gtcacctgcatcgtgaacgtctgtagcagctctgaccacagctcacagtg

SEQ ID NO: 3431 - DNA, 50 bp, Artificial sequence
  Synthetic construct
ggaatgctaagaactgctgggaggatgacagaaaggaagggcaagaaatc

SEQ ID NO: 3432 - DNA, 50 bp, Artificial sequence
  Synthetic construct
aaccagcagagactccttttctcctaaccgtcccggccaccgctgcctca

SEQ ID NO: 3433 - DNA, 50 bp, Artificial sequence
  Synthetic construct
cgcaataattccatagtcaagagcatcacagtctctgcatctggaacttc

SEQ ID NO: 3434 - DNA, 50 bp, Artificial sequence
  Synthetic construct
agtcccaggggaaattcagttttggcttccagtgtatcgactgtgcctcg

SEQ ID NO: 3435 - DNA, 50 bp, Artificial sequence
  Synthetic construct
cctactggatcatcattgaactaaaacacaaagcaagagaaaaaccttat

SEQ ID NO: 3436 - DNA, 50 bp, Artificial sequence
  Synthetic construct
ctgctgcacgcggaagaaggcacatggctgaatatcgacggtttccatat

SEQ ID NO: 3437 - DNA, 50 bp, Artificial sequence
  Synthetic construct
ctcccgattcgcagcgcatcgccttctatcgccttcttgacgagttcttc

SEQ ID NO: 3438 - DNA, 50 bp, Artificial sequence
  Synthetic construct
gagtcaggcaactatggatgaacgaaatagacagatcgctgagataggtg

SEQ ID NO: 3439 - DNA, 1884 bp, Homo sapiens
atgtttatggcacagattagtcactgctacccagagtacctaagtaattttcctcaagaggtgaaagatcttctctcctgcaatcataccgtattggatccagatctgcgaatgacattttgcaaagctttgatcttgctgagaaataagaatctcatcaatccatcaagcctgctagaactcttctttgaactttttcgttgccatgataaacttctgcgaaagactttatacacacatattgtgactgatatcaagaatataaatgcaaaacacaagaacaataaagtgaatgtagtattgcaaaatttcatgtacaccatgttaagagatagcaatgcaaccgcagccaagatgtctttagatgtaatgattgaactctacagaaggaacatctggaatgatgcaaaaactgtcaatgttatcacaactgcatgtttctctaaggtcaccaagatattagttgccgctttgacattctttcttgggaaagatgaagatgaaaaacaggacagtgactccgaatctgaggatgatggaccaacagcaagagacctgctagtacaatatgctacagggaagaaaagttccaaaaacaagaaaaagttggaaaaggcaatgaaagtgctcaagaaacaaaaaaagaagaaaaaaccagaggtgtttaacttttcagccattcacttgattcatgatccccaagattttgcggaaaaactactaaagcagcttgagtgctgtaaggagaggtttgaagtgaagatgatgctcatgaaccttatctccagattggtgggaattcatgagcttttcctcttcaatttctatccctttttgcaaaggtttctgcagccccaccaaagagaagtaaccaagatccttctgtttgctgcacaagcatctcatcacctagtacccccagagattattcaatcattgcttatgactgtggcaaacaattttgttaccgacaagaactctggagaagtcatgacagtaggaatcaatgctataaaggagataacagctcgatgtcctctggccatgactgaagaacttctccaagacctggctcagtataaaacacacaaggataagaatgtaatgatgtctgctagaactttgattcacctcttccgaacactgaatcctcagatgctgcagaagaaattccggggtaagcctacagaggcctccatagaagcaagagtacaagaatatggagaattagatgctaaagattacattccaggagcagaagttctggaagttgagaaagaagagaatgctgaaaatgatgaagatggatgggaaagtaccagtctcagtgaggaggaggatgctgatggtgaatggattgatgtgcaacactcttccgatgaagaacagcaagaaatctccaagaagctgaacagcatgcccatggaggagcggaaggccaaagctgcagccatcagcactagccgagttttaactcaggaagacttccagaaaatccgcatggcccaaatgagaaaagaacttgatgctgcccccgggaaatcccagaagaggaaatacattgaaatagacagtgatgaagagcccaggggtgaattactttctcttcgggacattgaacgccttcataaaaagccaaagtctgacaaagagacaagactagcaactgcaatggctggaaagacagaccgaaaagaatttgtgaggaagaaaaccaaaacaaatccattttccagttcgacaaataaagagaagaaaaaacagaagaactttatgatgatgcggtatagccagaatgtccggtcaaaaaataagcgttccttccgagaaaaacagttggcactacgagatgcacttttgaaaaagagaaaaagaatgaagtaa

SEQ ID NO: 3440 - DNA, 1524 bp, Homo sapiens
atgacgtccacctgcaccaacagcacgcgcgagagtaacagcagccacacgtgcatgcccctctccaaaatgcccatcagcctggcccacggcatcatccgctcaaccgtgctggttatcttcctcgccgcctctttcgtcggcaacatagtgctggcgctagtgttgcagcgcaagccgcagctgctgcaggtgaccaaccgttttatctttaacctcctcgtcaccgacctgctgcagatttcgctcgtggccccctgggtggtggccacctctgtgcctctcttctggcccctcaacagccacttctgcacggccctggttagcctcacccacctgttcgccttcgccagcgtcaacaccattgtcgtggtgtcagtggatcgctacttgtccatcatccaccctctctcctacccgtccaagatgacccagcgccgcggttacctgctcctctatggcacctggattgtggccatcctgcagagcactcctccactctacggctggggccaggctgcctttgatgagcgcaatgctctctgctccatgatctggggggccagccccagctacactattctcagcgtggtgtccttcatcgtcattccactgattgtcatgattgcctgctactccgtggtgttctgtgcagcccggaggcagcatgctctgctgtacaatgtcaagagacacagcttggaagtgcgagtcaaggactgtgtggagaatgaggatgaagagggagcagagaagaaggaggagttccaggatgagagtgagtttcgccgccagcatgaaggtgaggtcaaggccaaggagggcagaatggaagccaaggacggcagcctgaaggccaaggaaggaagcacggggaccagtgagagtagtgtagaggccaggggcagcgaggaggtcagagagagcagcacggtggccagcgacggcagcatggagggtaaggaaggcagcaccaaagttgaggagaacagcatgaaggcagacaagggtcgcacagaggtcaaccagtgcagcattgacttgggtgaagatgacatggagtttggtgaagacgacatcaatttcagtgaggatgacgtcgaggcagtgaacatcccggagagcctcccacccagtcgtcgtaacagcaacagcaaccctcctctgcccaggtgctaccagtgcaaagctgctaaagtgatcttcatcatcattttctcctatgtgctatccctggggccctactgctttttagcagtcctggccgtgtgggtggatgtcgaaacccaggtaccccagtgggtgatcaccataatcatctggcttttcttcctgcagtgctgcatccacccctatgtctatggctacatgcacaagaccattaagaaggaaatccaggacatgctgaagaagttcttctgcaaggaaaagcccccgaaagaagatagccacccagacctgcccggaacagagggtgggactgaaggcaagattgtcccttcctacgattctgctacttttcct

SEQ ID NO: 3441 - DNA, 480 bp, Homo sapiens; identical to SEQ ID NO: 688

SEQ ID NO: 3442 - DNA, 951 bp, Homo sapiens
atgaagatagcaaacaacacagtagtgacagaatttatcctccttggtctgactcagtctcaagatattcagctcttggtctttgtgctgatcttaattttctaccttatcatcctccctggaaattttctcattattttcaccataaggtcagaccctgggctcacagcccccctctatttctttctgggcaacttggccttcctggatgcatcctactccttcattgtggctcccaggatgttggtggacttcttctctgagaagaaggtaatctcctacagaggctgcatcactcagctctttttcttgcacttccttggaggaggggagggattactccttgttgtgatggcctttgaccgctacatcgccatctgccggcctctgcactgttcaactgtcatgaaccctagagcctgctatgcaatgatgttggctctgtggcttgggggttttgtccactccattatccaggtggtcctcatcctccgcttgcctttttgtggcccaaaccagctggacaacttcttctgtgatgtccgacaggtcatcaagctggcttgcaccgacatgtttgtggtggagcttctgatggtcttcaacagtggcctgatgacactcctgtgctttctggggcttctggcttcctatgcagtcatcctctgccatgttcgtagggcagcttctgaagggaagaacaaggccatgtccatgtgcaccactcgtgtcattattatacttcttatgtttggacctgctatcttcatctacatgtgccctttcagggccttaccagctgacaagatggtttctctctttcacacagtgatctttccattgatgaatcctatgatttatacccttcgcaaccaggaagtgaaaacttccatgaagaggttattgagtcgacatgtagtctgtcaagtggattttataataagaaactga

SEQ ID NO: 3443 - DNA, 930 bp, Homo sapiens
atgggattgggcaatgagagttccctaatggatttcatccttctaggcttctcagaccaccctcgtctggaggctgttctctttgtatttgtccttttcttctacctcctgacccttgtgggaaacttcaccataatcatcatctcatatctggatccccctcttcataccccaatgtacttttttctcagcaacctctctttactggacatctgcttcactactagccttgctcctcagaccttagttaacttgcaaagaccaaagaagacgatcacttacggtggttgtgtggcgcaactctatatttctctggcactgggctccactgaatgtatcctcttggctgacatggccttggatcggtacattgctgtctgcaaacccctccactatgtagtcatcatgaacccacggctttgccaacagctggcatctatctcctggctcagtggtttggctagttccctaatccatgcaacttttaccttgcaattgcctctctgtggcaaccataggctggaccattttatttgcgaagtaccagctcttctcaagttggcttgtgtggacaccactgtcaatgaattggtgctttttgttgttagtgttctgtttgttgtcattccaccagcactcatctccatctcctatggcttcataactcaagctgtgctgaggatcaaatcagtagaggcaaggcacaaagccttcagcacctgctcctcccaccttacagtggtgattatattctatggcaccataatctacgtgtacctgcaacctagtgacagctatgcccaggaccaagggaagtttatctccctcttctacaccatggtgacccccactttaaatcctatcatctatactttaaggaacaaggatatgaaagaggctctgaggaaacttctctcgggaaaattgtga

SEQ ID NO: 3444 - DNA, 423 bp, Homo sapiens
atgctggacctggagaaggagaaggacctgttcagcaggcagaagggctacctggaagaggagctcgactaccggaagcaagcccttgaccaggcttacctgaaaatccaagacctggaggccacactgtacacagcgctgcagcaggagccggggcggagggccggtgaggcgctgagcgagggccagcgggaggacctgcaggctgctgtggaaaaggtgcgcaggcagatcctcaggcagagccgcgagttcgacagccagatcctgcgggagcgcatggagctgctgcagcaggcccagcagagaatccgagaactggaggacaaactggagtttcagaagcggcacctgaaagaactggaggaaaagtttttgttcctttttttgtttttctcactagcattcattctgtggccttga

SEQ ID NO: 3445 - DNA, 936 bp, Homo sapiens
atggaaaaaataaacaacgtaactgaattcattttctggggtctttctcagagcccagagattgagaaagtttgttttgtggtgttttctttcttctacataatcattcttctgggaaatctcctcatcatgctgacagtttgcctgagcaacctgtttaagtcacccatgtatttctttctcagcttcttgtcttttgtggacatttgttactcttcagtcacagctcccaagatgattgttgacctgttagcaaaggacaaaaccatctcctatgtggggtgcatgttgcaactgcttggagtacatttctttggttgcactgagatcttcatccttactgtaatggcctatgatcgttatgtggctatctgtaaacccctacattatatgaccatcatgaaccgggagacatgcaataaaatgttattagggacgtgggtaggtgggttcttacactccattatccaagtggctctggtagtccaactacccttttgtggacccaatgagatagatcactacttttgtgatgttcaccctgtgttgaaacttgcctgcacagaaacatacattgttggtgttgttgtgacagccaacagtggtaccattgctctggggagttttgttatcttgctaatctcctacagcatcatcctagtttccctgagaaagcagtcagcagaaggcaggcgcaaagccctctccacctgtggctcccacattgccatggtcgttatctttttcggcccctgtacttttatgtacatgcgccctgatacgaccttttcagaggataagatggtggctgtattttacaccattatcactcccatgttaaatcctctgatttatacactgagaaatgcagaagtaaagaatgcaatgaagaaactgtggggcagaaatgttttcttggaggctaaagggaaatag

SEQ ID NO: 3446 - protein, 627 aa, Homo sapiens
MFMAQISHCYPEYLSNFPQEVKDLLSCNHTVLDPDLRMTFCKALILLRNKNLINPSSLLELFFELFRCHDKLLRKTLYTHIVTDIKNINAKHKNNKVNVVLQNFMYTMLRDSNATAAKMSLDVMIELYRRNIWNDAKTVNVITTACFSKVTKILVAALTFFLGKDEDEKQDSDSESEDDGPTARDLLVQYATGKKSSKNKKKLEKAMKVLKKQKKKKKPEVFNFSAIHLIHDPQDFAEKLLKQLECCKERFEVKMMLMNLISRLVGIHELFLFNFYPFLQRFLQPHQREVTKILLFAAQASHHLVPPEIIQSLLMTVANNFVTDKNSGEVMTVGINAIKEITARCPLAMTEELLQDLAQYKTHKDKNVMMSARTLIHLFRTLNPQMLQKKFRGKPTEASIEARVQEYGELDAKDYIPGAEVLEVEKEENAENDEDGWESTSLSEEEDADGEWIDVQHSSDEEQQEISKKLNSMPMEERKAKAAAISTSRVLTQEDFQKIRMAQMRKELDAAPGKSQKRKYIEIDSDEEPRGELLSLRDIERLHKKPKSDKETRLATAMAGKTDRKEFVRKKTKTNPFSSSTNKEKKKQKNFMMMRYSQNVRSKNKRSFREKQLALRDALLKKRKRMK

SEQ ID NO: 3447 - protein, 508 aa, Homo sapiens; identical to SEQ ID NO: 1808

SEQ ID NO: 3448 - protein, 160 aa, Homo sapiens; identical to SEQ ID NO: 1834

SEQ ID NO: 3449 - protein, 316 aa, Homo sapiens
MKIANNTVVTEFILLGLTQSQDIQLLVFVLILIFYLIILPGNFLIIFTIRSDPGLTAPLYFFLGNLAFLDASYSFIVAPRMLVDFFSEKKVISYRGCITQLFFLHFLGGGEGLLLVVMAFDRYIAICRPLHCSTVMNPRACYAMMLALWLGGFVHSIIQVVLILRLPFCGPNQLDNFFCDVRQVIKLACTDMFVVELLMVFNSGLMTLLCFLGLLASYAVILCHVRRAASEGKNKAMSMCTTRVIIILLMFGPAIFIYMCPFRALPADKMVSLFHTVIFPLMNPMIYTLRNQEVKTSMKRLLSRHVVCQVDFIIRN

SEQ ID NO: 3450 - protein, 309 aa, Homo sapiens
MGLGNESSLMDFILLGFSDHPRLEAVLFVFVLFFYLLTLVGNFTIIIISYLDPPLHTPMYFFLSNLSLLDICFTTSLAPQTLVNLQRPKKTITYGGCVAQLYISLALGSTECILLADMALDRYIAVCKPLHYVVIMNPRLCQQLASISWLSGLASSLIHATFTLQLPLCGNHRLDHFICEVPALLKLACVDTTVNELVLFVVSVLFVVIPPALISISYGFITQAVLRIKSVEARHKAFSTCSSHLTVVIIFYGTIIYVYLQPSDSYAQDQGKFISLFYTMVTPTLNPIIYTLRNKDMKEALRKLLSGKL

SEQ ID NO: 3451 - protein, 140 aa, Homo sapiens
MLDLEKEKDLFSRQKGYLEEELDYRKQALDQAYLKIQDLEATLYTALQQEPGRRAGEALSEGQREDLQAAVEKVRRQILRQSREFDSQILRERMELLQQAQQRIRELEDKLEFQKRHLKELEEKFLFLFLFFSLAFILWP

SEQ ID NO: 3452 - protein, 311 aa, Homo sapiens
MEKINNVTEFIFWGLSQSPEIEKVCFVVFSFFYIIILLGNLLIMLTVCLSNLFKSPMYFFLSFLSFVDICYSSVTAPKMIVDLLAKDKTISYVGCMLQLLGVHFFGCTEIFILTVMAYDRYVAICKPLHYMTIMNRETCNKMLLGTWVGGFLHSIIQVALVVQLPFCGPNEIDHYFCDVHPVLKLACTETYIVGVVVTANSGTIALGSFVILLISYSIILVSLRKQSAEGRRKALSTCGSHIAMVVIFFGPCTFMYMRPDTTFSEDKMVAVFYTIITPMLNPLIYTLRNAEVKNAMKKLWGRNVFLEAKGK

SEQ ID NO: 3453 - DNA, 7377 bp, Homo sapiens
tacagccccaaggtcgctccctctggggccctttcttccccattcttcccagcagcccaaagctctggtgggacaggggcagcccctggggagggaggagaggacccaggaacccggctaggagggtggcccacccatttccagtgtgacctgttcccattcccccatgtctcctcccatccctcccgccactcagctcaggctgatgagaagcagagcaacgggtgtatcggtgttttctttcctggtggggtagtggggtggggctgaggagagaaaagggtgattagcgtggggccccgccctcttttgtcctcttcccaggttccctggccccttcggagaaacgcacttggttcgggccagccgcctgaggggacgggctcacgtctgctcctcacactgcagctgctgggccgtggagcttccccagggagccagggggacttttgccgcagccatgaagggggcacgctggaggagggtcccctgggtgtccctgagctgcctgtgtctctgcctccttccgcatgtggtcccaggaaccacagaggacacattaataactggaagtaaaactcctgccccagtcacctcaacaggctcaacaacagcgacactagagggacaatcaactgcagcttcttcaaggacctctaatcaggacatatcagcttcatctcagaaccaccagactaagagcacggagaccaccagcaaagctcaaaccgacaccctcacgcagatgatgacatcaactcttttttcttccccaagtgtacacaatgtgatggagactgttacgcaggagacagctcctccagatgaaatgaccacatcatttccctccagtgtcaccaacacactcatgatgacatcaaagactataacaatgacaacctccacagactccactcttggaaacacagaagagacatcaacagcaggaactgaaagttctaccccagtgacctcagcagtctcaataacagctggacaggaaggacaatcacgaacaacttcctggaggacctctatccaagacacatcagcttcttctcagaaccactggactcggagcacgcagaccaccagggaatctcaaaccagcaccctaacacacagaaccacttcaactccttctttctctccaagtgtacacaatgtgacagggactgtttctcagaagacatctccttcaggtgaaacagctacctcatccctctgtagtgtcacaaacacatccatgatgacatcagagaagataacagtgacaacctccacaggctccactcttggaaacccaggggagacatcatcagtacctgttactggaagtcttatgccagtcacctcagcagccttagtaacagttgatccagaaggacaatcaccagcaactttctcaaggacttctactcaggacacaacagctttttctaagaaccaccagactcagagcgtggagaccaccagagtatctcaaatcaacaccctcaacaccctcacaccggttacaacatcaactgttttatcctcaccaagtggattcaacccaagtggaacagtttctcaggagacattcccttctggtgaaacaaccatctcatccccttccagtgtcagcaatacattcctggtaacatcaaaggtgttcagaatgccaatctccagagactctactcttggaaacacagaggagacatcactatctgtaagtggaaccatttctgcaatcacttccaaagtttcaaccatatggtggtcagacactctgtcaacagcactctcccccagttctctacctccaaaaatatccacagctttccacacccagcagagtgaaggtgcagagaccacaggacggcctcatgagaggagctcattctctccaggtgtgtctcaagaaatatttactctacatgaaacaacaacatggccttcctcattctccagcaaaggccacacaacttggtcacaaacagaactgccctcaacatcaacaggtgctgccactaggcttgtcacaggaaatccatctacaggggcagctggcactattccaagggtcccctctaaggtctcagcaataggggaaccaggagagcccaccacatactcctcccacagcacaactctcccaaaaacaacaggggcaggcgcccagacacaatggacacaagaaacggggaccactggagaggctcttctcagcagcccaagctacagtgtgactcagatgataaaaacggccacatccccatcttcttcacctatgctggatagacacacatcacaacaaattacaacggcaccatcaacaaatcattcaacaatacattccacaagcacctctcctcaggaatcaccagctgtttcccaaaggggtcacactcaagccccgcagaccacacaagaatcacaaaccacgaggtccgtctcccccatgactgacaccaagacagtcaccaccccaggttcttccttcacagccagtgggcactcgccctcagaaattgttcctcaggacgcacccaccataagtgcagcaacaacctttgccccagctcccaccggggatggtcacacaacccaggccccgaccacagcactgcaggcagcacccagcagccatgatgccaccctggggccctcaggaggcacgtcactttccaaaacaggtgcccttactctggccaactctgtagtgtcaacaccagggggcccagaaggacaatggacatcagcctctgccagcacctcacctgacacagcagcagccatgacccatacccaccaggctgagagcacagaggcctctggacaaacacagaccagcgaaccggcctcctcagggtcacgaaccacctcagcgggcacagctaccccttcctcatccggggcgagtggcacaacaccttcaggaagcgaaggaatatccacctcaggagagacgacaaggttttcatcaaacccctccagggacagtcacacaacccagtcaacaaccgaattgctgtccgcctcagccagtcatggtgccatcccagtaagcacaggaatggcgtcttcgatcgtccccggcacctttcatcccaccctctctgaggcctccactgcagggagaccgacaggacagtcaagcccaacttctcccagtgcctctcctcaggagacagccgccatttcccggatggcccagactcagaggacaagaaccagcagagggtctgacactatcagcctggcgtcccaggcaaccgacaccttctcaacagtcccacccacacctccatcgatcacatccagtgggcttacatctccacaaacccagacccacactctgtcaccttcagggtctggtaaaaccttcaccacggccctcatcagcaacgccacccctcttcctgtcaccagcacctcctcagcctccacaggtcacgccacccctcttgctgtcagcagtgctacctcagcttccacagtatcctcggactcccctctgaagatggaaacatcaggaatgacaacaccgtcactgaagacagacggtgggagacgcacagccacatcaccaccccccacaacctcccagaccatcatttccaccattcccagcactgccatgcacacccgctccacagctgcccccatccccatcctgcctgagagaggagtttccctcttcccctatggggcagacgccggggacctggagttcgtcaggaggaccgtggacttcacctccccactcttcaagccggcgactggcttcccccttggctcctctctccgtgattccctctacttcacagacaatggccagatcatcttcccagagtcagactaccagattttctcctaccccaacccactcccaacaggcttcacaggccgggaccctgtggccctggtggctccgttctgggacgatgctgacttctccactggtcgggggaccacattttatcaggaatacgagacgttctatggtgaacacagcctgctagtccagcaggccgagtcttggattagaaagatcacaaacaacgggggctacaaggccaggtgggccctaaaggtcacgtgggtcaatgcccacgcctatcctgcccagtggaccctcgggagcaacacctaccaagccatcctctccacggacgggagcaggtcctatgccctgtttctctaccagagcggtgggatgcagtgggacgtggcccagcgctcaggcaagccggtgctcatgggcttctctagtggagatggctttttcgaaaacagcccactgatgtcccagccagtgtgggagaggtatcgccctgatagattcctgaattccaactcaggcctccaagggctgcagttctacgggctacaccgggaagaaaggcccaactaccgtctcgagtgcctgcagtggctgaagagccagcctcggtggcccagctggggctggaaccaggtctcctgcccttgttcctggcagcagggacgacgggacttacgattccaacccgtcagcataggtcgctggggcctcggcagtaggcagctgtgcagcttcacctcttggcgaggaggcgtgtgctgcagctacgggccctggggagagtttcgtgaaggctggcacgtgcagcgtccttggcagttggcccaggaactggagccacagagctggtgctgccgctggaatgacaagccctacctctgtgccctgtaccagcagaggcggccccacgtgggctgtgctacatacaggcccccacagcccgcctggatgttcggggacccccacatcaccaccttggatggtgtcagttacaccttcaatgggctgggggacttcctgctggtcggggcccaagacgggaactcctccttcctgcttcagggccgcaccgcccagactggctcagcccaggccaccaacttcatcgcctttgcggctcagtaccgctccagcagcctgggccccgtcacggtccaatggctccttgagcctcacgacgcaatccgtgtcctgctggataaccagactgtgacatttcagcctgaccatgaagacggcggaggccaggagacgttcaacgccaccggagtcctcctgagccgcaacggctctgaggcctccgccagcttcgacggctgggccaccgtctcggtgatcgcgctctccaacatcctccactcctccgccagcctcccgcccgagtaccagaaccgcacggaggggctcctgggggtctggaataacaatccagaggacgacttcaggatgcccaatggctccaccattcccccagggagccctgaggagatgcttttccactttggaatgacctggcagatcaacgggacaggcctccttggcaagaggaatgaccagctgccttccaacttcacccctgttttctactcacaactgcaaaaaaacagctcctgggctgaacatttgatctccaactgtgacggagatagctcatgcatctatgacaccctggccctgcgcaacgcaagcatcggacttcacacgagggaagtcagtaaaaactacgagcaggcgaacgccaccctcaatcagtacccgccctccatcaatggtggtcgtgtgattgaagcctacaaggggcagaccacgctgattcagtacaccagcaatgctgaggatgccaacttcacgctcagagacagctgcaccgacttggagctctttgagaatgggacgttgctgtggacacccaagtcgctggagccattcactctggagattctagcaagaagtgccaagattggcttggcatctgcactccagcccaggactgtggtctgccattgcaatgcagagagccagtgtttgtacaatcagaccagcagggtgggcaactcctccctggaggtggctggctgcaagtgtgacgggggcaccttcggccgctactgcgagggctccgaggatgcctgtgaggagccgtgcttcccgagtgtccactgcgttcctgggaagggctgcgaggcctgccctccaaacctgactggggatgggcggcactgtgcggctctggggagctctttcctgtgtcagaaccagtcctgccctgtgaattactgctacaatcaaggccactgctacatctcccagactctgggctgtcagcccatgtgcacctgccccccagccttcactgacagccgctgcttcctggctgggaacaacttcagtccaactgtcaacctagaacttcccttaagagtcatccagctcttgctcagtgaagaggaaaatgcctccatggcagaggtcaacgcctcggtggcatacagactggggaccctggacatgcgggcctttctccgcaacagccaagtggaacgaatcgattctgcagcaccggcctcgggaagccccatccaacactggatggtcatctcggagttccagtaccgccctcggggcccggtcattgacttcctgaacaaccagctgctggccgcggtggtggaggcgttcttataccacgttccacggaggagtgaggagcccaggaacgacgtggtcttccagcccatttccggggaagacgtgcgcgatgtgacagccctgaacgtgagcacgctgaaggcttacttcagatgcgatggctacaagggctacgacctggtctacagcccccagagcggcttcacctgcgtgtccccgtgcagtaggggctactgtgaccatggaggccagtgccagcacctgcccagtgggccccgctgcagctgtgtgtccttctccatctacacggcctggggcgagcactgtgagcacctgagcatgaaactcgacgcgttcttcggcatcttctttggggccctgggcggcctcttgctgctgggggtcgggacgttcgtggtcctgcgcttctggggttgctccggggccaggttctcctatttcctgaactcagctgaggccttgccttgaaggggcagctgtggcctaggctacctcaagactcacctcatccttaccgcacatttaaggcgccattgcttttgggagactggaaaagggaaggtgactgaaggctgtcaggattcttcaaggagaatgaatactgggaatcaagacaagactataccttatccataggcgcaggtgcacagggggaggccataaagatcaaacatgcatggatgggtcctcacgcagacacacccacagaaggacactagcctgtgcacgcgcgcgtgcacacacacacacacacacacgagttcataatgtggtgatggccctaagttaagcaaaatgcttctgcacacaaaactctctggtttacttcaaattaactctatttaaataaagtctctctgactttttgtgtctcc

SEQ ID NO: 3454 - DNA, 7348 bp, Homo sapiens
tacagccccaaggtcgctccctctggggccctttcttccccattcttcccagcagcccaaagctctggtgggacaggggcagcccctggggagggaggagaggacccaggaacccggctaggagggtggcccacccatttccagtgtgacctgttcccattcccccatgtctcctcccatccctcccgccactcagctcaggctgatgagaagcagagcaacgggtgtatcggtgttttctttcctggtggggtagtggggtggggctgaggagagaaaagggtgattagcgtggggccccgccctcttttgtcctcttcccaggttccctggccccttcggagaaacgcacttggttcgggccagccgcctgaggggacgggctcacgtctgctcctcacactgcagctgctgggccgtggagcttccccagggagccagggggacttttgccgcagccatgaagggggcacgctggaggagggtcccctgggtgtccctgagctgcctgtgtctctgcctccttccgcatgtggtcccaggaaccacagaggacacattaataactggaagtaaaactcctgccccagtcacctcaacaggctcaacaacagcgacactagagggacaatcaactgcagcttcttcaaggacctctaatcaggacatatcagcttcatctcagaaccaccagactaagagcacggagaccaccagcaaagctcaaaccgacaccctcacgcagatgatgacatcaactcttttttcttccccaagtgtacacaatgtgatggagactgttacgcaggagacagctcctccagatgaaatgaccacatcatttccctccagtgtcaccaacacactcatgatgacatcaaagactataacaatgacaacctccacagactccactcttggaaacacagaagagacatcaacagcaggaactgaaagttctaccccagtgacctcagcagtctcaataacagctggacaggaaggacaatcacgaacaacttcctggaggacctctatccaagacacatcagcttcttctcagaaccactggactcggagcacgcagaccaccagggaatctcaaaccagcaccctaacacacagaaccacttcaactccttctttctctccaagtgtacacaatgtgacagggactgtttctcagaagacatctccttcaggtgaaacagctacctcatccctctgtagtgtcacaaacacatccatgatgacatcagagaagataacagtgacaacctccacaggctccactcttggaaacccaggggagacatcatcagtacctgttactggaagtcttatgccagtcacctcagcagccttagtaacagttgatccagaaggacaatcaccagcaactttctcaaggacttctactcaggacacaacagctttttctaagaaccaccagactcagagcgtggagaccaccagagtatctcaaatcaacaccctcaacaccctcacaccggttacaacatcaactgttttatcctcaccaagtggattcaacccaagtggaacagtttctcaggagacattcccttctggtgaaacaaccatctcatccccttccagtgtcagcaatacattcctggtaacatcaaaggtgttcagaatgccaatctccagagactctactcttggaaacacagaggagacatcactatctgtaagtggaaccatttctgcaatcacttccaaagtttcaaccatatggtggtcagacactctgtcaacagcactctcccccagttctctacctccaaaaatatccacagctttccacacccagcagagtgaaggtgcagagaccacaggacggcctcatgagaggagctcattctctccaggtgtgtctcaagaaatatttactctacatgaaacaacaacatggccttcctcattctccagcaaaggccacacaacttggtcacaaacagaactgccctcaacatcaacaggtgctgccactaggcttgtcacaggaaatccatctacaggggcagctggcactattccaagggtcccctctaaggtctcagcaataggggaaccaggagagcccaccacatactcctcccacagcacaactctcccaaaaacaacaggggcaggcgcccagacacaatggacacaagaaacggggaccactggagaggctcttctcagcagcccaagctacagtgtgactcagatgataaaaacggccacatccccatcttcttcacctatgctggatagacacacatcacaacaaattacaacggcaccatcaacaaatcattcaacaatacattccacaagcacctctcctcaggaatcaccagctgtttcccaaaggggtcacactcaagccccgcagaccacacaagaatcacaaaccacgaggtccgtctcccccatgactgacaccaagacagtcaccaccccaggttcttccttcacagccagtgggcactcgccctcagaaattgttcctcaggacgcacccaccataagtgcagcaacaacctttgccccagctcccaccggggatggtcacacaacccaggccccgaccacagcactgcaggcagcacccagcagccatgatgccaccctggggccctcaggaggcacgtcactttccaaaacaggtgcccttactctggccaactctgtagtgtcaacaccagggggcccagaaggacaatggacatcagcctctgccagcacctcacctgacacagcagcagccatgacccatacccaccaggctgagagcacagaggcctctggacaaacacagaccagcgaaccggcctcctcagggtcacgaaccacctcagcgggcacagctaccccttcctcatccggggcgagtggcacaacaccttcaggaagcgaaggaatatccacctcaggagagacgacaaggttttcatcaaacccctccagggacagtcacacaacccagtcaacaaccgaattgctgtccgcctcagccagtcatggtgccatcccagtaagcacaggaatggcgtcttcgatcgtccccggcacctttcatcccaccctctctgaggcctccactgcagggagaccgacaggacagtcaagcccaacttctcccagtgcctctcctcaggagacagccgccatttcccggatggcccagactcagaggacaagaaccagcagagggtctgacactatcagcctggcgtcccaggcaaccgacaccttctcaacagtcccacccacacctccatcgatcacatccagtgggcttacatctccacaaacccagacccacactctgtcaccttcagggtctggtaaaaccttcaccacggccctcatcagcaacgccacccctcttcctgtcaccagcacctcctcagcctccacaggtcacgccacccctcttgctgtcagcagtgctacctcagcttccacagtatcctcggactcccctctgaagatggaaacatcaggaatgacaacaccgtcactgaagacagacggtgggagacgcacagccacatcaccaccccccacaacctcccagaccatcatttccaccattcccagcactgccatgcacacccgctccacagctgcccccatccccatcctgcctgagagaggagtttccctcttcccctatggggcagacgccggggacctggagttcgtcaggaggaccgtggacttcacctccccactcttcaagccggcgactggcttcccccttggctcctctctccgtgattccctctacttcacagacaatggccagatcatcttcccagagtcagactaccagattttctcctaccccaacccactcccaacaggcttcacaggccgggaccctgtggccctggtggctccgttctgggacgatgctgacttctccactggtcgggggaccacattttatcaggaatacgagacgttctatggtgaacacagcctgctagtccagcaggccgagtcttggattagaaagatcacaaacaacgggggctacaaggccaggtgggccctaaaggtcacgtgggtcaatgcccacgcctatcctgcccagtggaccctcgggagcaacacctaccaagccatcctctccacggacgggagcaggtcctatgccctgtttctctaccagagcggtgggatgcagtgggacgtggcccagctctagtggagatggctttttcgaaaacagcccactgatgtcccagccagtgtgggagaggtatcgccctgatagattcctgaattccaactcaggcctccaagggctgcagttctacgggctacaccgggaagaaaggcccaactaccgtctcgagtgcctgcagtggctgaagagccagcctcggtggcccagctggggctggaaccaggtctcctgcccttgttcctggcagcagggacgacgggacttacgattccaacccgtcagcataggtcgctggggcctcggcagtaggcagctgtgcagcttcacctcttggcgaggaggcgtgtgctgcagctacgggccctggggagagtttcgtgaaggctggcacgtgcagcgtccttggcagttggcccaggaactggagccacagagctggtgctgccgctggaatgacaagccctacctctgtgccctgtaccagcagaggcggccccacgtgggctgtgctacatacaggcccccacagcccgcctggatgttcggggacccccacatcaccaccttggatggtgtcagttacaccttcaatgggctgggggacttcctgctggtcggggcccaagacgggaactcctccttcctgcttcagggccgcaccgcccagactggctcagcccaggccaccaacttcatcgcctttgcggctcagtaccgctccagcagcctgggccccgtcacggtccaatggctccttgagcctcacgacgcaatccgtgtcctgctggataaccagactgtgacatttcagcctgaccatgaagacggcggaggccaggagacgttcaacgccaccggagtcctcctgagccgcaacggctctgaggcctccgccagcttcgacggctgggccaccgtctcggtgatcgcgctctccaacatcctccactcctccgccagcctcccgcccgagtaccagaaccgcacggaggggctcctgggggtctggaataacaatccagaggacgacttcaggatgcccaatggctccaccattcccccagggagccctgaggagatgcttttccactttggaatgacctggcagatcaacgggacaggcctccttggcaagaggaatgaccagctgccttccaacttcacccctgttttctactcacaactgcaaaaaaacagctcctgggctgaacatttgatctccaactgtgacggagatagctcatgcatctatgacaccctggccctgcgcaacgcaagcatcggacttcacacgagggaagtcagtaaaaactacgagcaggcgaacgccaccctcaatcagtacccgccctccatcaatggtggtcgtgtgattgaagcctacaaggggcagaccacgctgattcagtacaccagcaatgctgaggatgccaacttcacgctcagagacagctgcaccgacttggagctctttgagaatgggacgttgctgtggacacccaagtcgctggagccattcactctggagattctagcaagaagtgccaagattggcttggcatctgcactccagcccaggactgtggtctgccattgcaatgcagagagccagtgtttgtacaatcagaccagcagggtgggcaactcctccctggaggtggctggctgcaagtgtgacgggggcaccttcggccgctactgcgagggctccgaggatgcctgtgaggagccgtgcttcccgagtgtccactgcgttcctgggaagggctgcgaggcctgccctccaaacctgactggggatgggcggcactgtgcggctctggggagctctttcctgtgtcagaaccagtcctgccctgtgaattactgctacaatcaaggccactgctacatctcccagactctgggctgtcagcccatgtgcacctgccccccagccttcactgacagccgctgcttcctggctgggaacaacttcagtccaactgtcaacctagaacttcccttaagagtcatccagctcttgctcagtgaagaggaaaatgcctccatggcagaggtcaacgcctcggtggcatacagactggggaccctggacatgcgggcctttctccgcaacagccaagtggaacgaatcgattctgcagcaccggcctcgggaagccccatccaacactggatggtcatctcggagttccagtaccgccctcggggcccggtcattgacttcctgaacaaccagctgctggccgcggtggtggaggcgttcttataccacgttccacggaggagtgaggagcccaggaacgacgtggtcttccagcccatttccggggaagacgtgcgcgatgtgacagccctgaacgtgagcacgctgaaggcttacttcagatgcgatggctacaagggctacgacctggtctacagcccccagagcggcttcacctgcgtgtccccgtgcagtaggggctactgtgaccatggaggccagtgccagcacctgcccagtgggccccgctgcagctgtgtgtccttctccatctacacggcctggggcgagcactgtgagcacctgagcatgaaactcgacgcgttcttcggcatcttctttggggccctgggcggcctcttgctgctgggggtcgggacgttcgtggtcctgcgcttctggggttgctccggggccaggttctcctatttcctgaactcagctgaggccttgccttgaaggggcagctgtggcctaggctacctcaagactcacctcatccttaccgcacatttaaggcgccattgcttttgggagactggaaaagggaaggtgactgaaggctgtcaggattcttcaaggagaatgaatactgggaatcaagacaagactataccttatccataggcgcaggtgcacagggggaggccataaagatcaaacatgcatggatgggtcctcacgcagacacacccacagaaggacactagcctgtgcacgcgcgcgtgcacacacacacacacacacacgagttcataatgtggtgatggccctaagttaagcaaaatgcttctgcacacaaaactctctggtttacttcaaattaactctatttaaataaagtctctctgactttttgtgtctcc

SEQ ID NO: 3455 - DNA, 7216 bp, Homo sapiens
tacagccccaaggtcgctccctctggggccctttcttccccattcttcccagcagcccaaagctctggtgggacaggggcagcccctggggagggaggagaggacccaggaacccggctaggagggtggcccacccatttccagtgtgacctgttcccattcccccatgtctcctcccatccctcccgccactcagctcaggctgatgagaagcagagcaacgggtgtatcggtgttttctttcctggtggggtagtggggtggggctgaggagagaaaagggtgattagcgtggggccccgccctcttttgtcctcttcccaggttccctggccccttcggagaaacgcacttggttcgggccagccgcctgaggggacgggctcacgtctgctcctcacactgcagctgctgggccgtggagcttccccagggagccagggggacttttgccgcagccatgaagggggcacgctggaggagggtcccctgggtgtccctgagctgcctgtgtctctgcctccttccgcatgtggtcccaggaaccacagaggacacattaataactggaagtaaaactcctgccccagtcacctcaacaggctcaacaacagcgacactagagggacaatcaactgcagcttcttcaaggacctctaatcaggacatatcagcttcatctcagaaccaccagactaagagcacggagaccaccagcaaagctcaaaccgacaccctcacgcagatgatgacatcaactcttttttcttccccaagtgtacacaatgtgatggagactgttacgcaggagacagctcctccagatgaaatgaccacatcatttccctccagtgtcaccaacacactcatgatgacatcaaagactataacaatgacaacctccacagactccactcttggaaacacagaagagacatcaacagcaggaactgaaagttctaccccagtgacctcagcagtctcaataacagctggacaggaaggacaatcacgaacaacttcctggaggacctctatccaagacacatcagcttcttctcagaaccactggactcggagcacgcagaccaccagggaatctcaaaccagcaccctaacacacagaaccacttcaactccttctttctctccaagtgtacacaatgtgacagggactgtttctcagaagacatctccttcaggtgaaacagctacctcatccctctgtagtgtcacaaacacatccatgatgacatcagagaagataacagtgacaacctccacaggctccactcttggaaacccaggggagacatcatcagtacctgttactggaagtcttatgccagtcacctcagcagccttagtaacagttgatccagaaggacaatcaccagcaactttctcaaggacttctactcaggacacaacagctttttctaagaaccaccagactcagagcgtggagaccaccagagtatctcaaatcaacaccctcaacaccctcacaccggttacaacatcaactgttttatcctcaccaagtggattcaacccaagtggaacagtttctcaggagacattcccttctggtgaaacaaccatctcatccccttccagtgtcagcaatacattcctggtaacatcaaaggtgttcagaatgccaatctccagagactctactcttggaaacacagaggagacatcactatctgtaagtggaaccatttctgcaatcacttccaaagtttcaaccatatggtggtcagacactctgtcaacagcactctcccccagttctctacctccaaaaatatccacagctttccacacccagcagagtgaaggtgcagagaccacaggacggcctcatgagaggagctcattctctccaggtgtgtctcaagaaatatttactctacatgaaacaacaacatggccttcctcattctccagcaaaggccacacaacttggtcacaaacagaactgccctcaacatcaacaggtgctgccactaggcttgtcacaggaaatccatctacaggggcagctggcactattccaagggtcccctctaaggtctcagcaataggggaaccaggagagcccaccacatactcctcccacagcacaactctcccaaaaacaacaggggcaggcgcccagacacaatggacacaagaaacggggaccactggagaggctcttctcagcagcccaagctacagtgtgactcagatgataaaaacggccacatccccatcttcttcacctatgctggatagacacacatcacaacaaattacaacggcaccatcaacaaatcattcaacaatacattccacaagcacctctcctcaggaatcaccagctgtttcccaaaggggtcacactcaagccccgcagaccacacaagaatcacaaaccacgaggtccgtctcccccatgactgacaccaagacagtcaccaccccaggttcttccttcacagccagtgggcactcgccctcagaaattgttcctcaggacgcacccaccataagtgcagcaacaacctttgccccagctcccaccggggatggtcacacaacccaggccccgaccacagcactgcaggcagcacccagcagccatgatgccaccctggggccctcaggaggcacgtcactttccaaaacaggtgcccttactctggccaactctgtagtgtcaacaccagggggcccagaaggacaatggacatcagcctctgccagcacctcacctgacacagcagcagccatgacccatacccaccaggctgagagcacagaggcctctggacaaacacagaccagcgaaccggcctcctcagggtcacgaaccacctcagcgggcacagctaccccttcctcatccggggcgagtggcacaacaccttcaggaagcgaaggaatatccacctcaggagagacgacaaggttttcatcaaacccctccagggacagtcacacaacccagtcaacaaccgaattgctgtccgcctcagccagtcatggtgccatcccagtaagcacaggaatggcgtcttcgatcgtccccggcacctttcatcccaccctctctgaggcctccactgcagggagaccgacaggacagtcaagcccaacttctcccagtgcctctcctcaggagacagccgccatttcccggatggcccagactcagaggacaagaaccagcagagggtctgacactatcagcctggcgtcccaggcaaccgacaccttctcaacagtcccacccacacctccatcgatcacatccagtgggcttacatctccacaaacccagacccacactctgtcaccttcagggtctggtaaaaccttcaccacggccctcatcagcaacgccacccctcttcctgtcaccagcacctcctcagcctccacaggtcacgccacccctcttgctgtcagcagtgctacctcagcttccacagtatcctcggactcccctctgaagatggaaacatcaggaatgacaacaccgtcactgaagacagacggtgggagacgcacagccacatcaccaccccccacaacctcccagaccatcatttccaccattcccagcactgccatgcacacccgctccacagctgcccccatccccatcctgcctgagagaggagtttccctcttcccctatggggcagacgccggggacctggagttcgtcaggaggaccgtggacttcacctccccactcttcaagccggcgactggcttcccccttggctcctctctccgtgattccctctacttcacagacaatggccagatcatcttcccagagtcagactaccagattttctcctaccccaacccactcccaacaggcttcacaggccgggaccctgtggccctggtggctccgttctgggacgatgctgacttctccactggtcgggggaccacattttatcaggaatacgagacgttctatggtgaacacagcctgctagtccagcaggccgagtcttggattagaaagatcacaaacaacgggggctacaaggccaggtgggccctaaaggtcacgtgggtcaatgcccacgcctatcctgcccagtggaccctcgggagcaacacctaccaagccatcctctccacggacgggagcaggtcctatgccctgtttctctaccagagcggtgggatgcagtgggacgtggcccagcgctcaggcaagccggtgctcatgggcttctctagtggagatggctttttcgaaaacagcccactgatgtcccagccagtgtgggagaggtatcgccctgatagattcctgaattccaactcaggcctccaagggctgcagttctacgggctacaccgggaagaaaggcccaactaccgtctcgagtgcctgcagtggctgaagagccagcctcggtggcccagctggggctggaaccaggtctcctgcccttgttcctggcagcagggacgacgggacttacgattccaacccgtcagcataggtcgctggggcctcggcagtaggcagctgtgcagcttcacctcttggcgaggaggcgtgtgctgcagctacgggccctggggagagtttcgtgaaggctggcacgtgcagcgtccttggcagttggcccaggaactggagccacagagctggtgctgccgctggaatgacaagccctacctctgtgccctgtaccagcagaggcggccccacgtgggctgtgctacatacaggcccccacagcccgcctggatgttcggggacccccacatcaccaccttggatggtgtcagttacaccttcaatgggctgggggacttcctgctggtcggggcccaagacgggaactcctccttcctgcttcagggccgcaccgcccagactggctcagcccaggccaccaacttcatcgcctttgcggctcagtaccgctccagcagcctgggccccgtcacggtccaatggctccttgagcctcacgacgcaatccgtgtcctgctggataaccagactgtgacatttcagcctgaccatgaagacggcggaggccaggagacgttcaacgccaccggagtcctcctgagccgcaacggctctgaggcctccgccagcttcgacggctgggccaccgtctcggtgatcgcgctctccaacatcctccactcctccgccagcctcccgcccgagtaccagaaccgcacggaggggctcctgggggtctggaataacaatccagaggacgacttcaggatgcccaatggctccaccattcccccagggagccctgaggagatgcttttccactttggaatgacctggcagatcaacgggacaggcctccttggcaagaggaatgaccagctgccttccaacttcacccctgttttctactcacaactgcaaaaaaacagctcctgggctgaacatttgatctccaactgtgacggagatagctcatgcatctatgacaccctggccctgcgcaacgcaagcatcggacttcacacgagggaagtcagtaaaaactacgagcaggcgaacgccaccctcaatcagtacccgccctccatcaatggtggtcgtgtgattgaagcctacaaggggcagaccacgctgattcagtacaccagcaatgctgaggatgccaacttcacgctcagagacagctgcaccgacttggagctctttgagaatgggacgttgctgtggacacccaagtcgctggagccattcactctggagattctagcaagaagtgccaagattggcttggcatctgcactccagcccaggactgtggtctgccattgcaatgcagagagccagtgtttgtacaatcagaccagcagggtgggcaactcctccctggagctctggggagctctttcctgtgtcagaaccagtcctgccctgtgaattactgctacaatcaaggccactgctacatctcccagactctgggctgtcagcccatgtgcacctgccccccagccttcactgacagccgctgcttcctggctgggaacaacttcagtccaactgtcaacctagaacttcccttaagagtcatccagctcttgctcagtgaagaggaaaatgcctccatggcagaggtcaacgcctcggtggcatacagactggggaccctggacatgcgggcctttctccgcaacagccaagtggaacgaatcgattctgcagcaccggcctcgggaagccccatccaacactggatggtcatctcggagttccagtaccgccctcggggcccggtcattgacttcctgaacaaccagctgctggccgcggtggtggaggcgttcttataccacgttccacggaggagtgaggagcccaggaacgacgtggtcttccagcccatttccggggaagacgtgcgcgatgtgacagccctgaacgtgagcacgctgaaggcttacttcagatgcgatggctacaagggctacgacctggtctacagcccccagagcggcttcacctgcgtgtccccgtgcagtaggggctactgtgaccatggaggccagtgccagcacctgcccagtgggccccgctgcagctgtgtgtccttctccatctacacggcctggggcgagcactgtgagcacctgagcatgaaactcgacgcgttcttcggcatcttctttggggccctgggcggcctcttgctgctgggggtcgggacgttcgtggtcctgcgcttctggggttgctccggggccaggttctcctatttcctgaactcagctgaggccttgccttgaaggggcagctgtggcctaggctacctcaagactcacctcatccttaccgcacatttaaggcgccattgcttttgggagactggaaaagggaaggtgactgaaggctgtcaggattcttcaaggagaatgaatactgggaatcaagacaagactataccttatccataggcgcaggtgcacagggggaggccataaagatcaaacatgcatggatgggtcctcacgcagacacacccacagaaggacactagcctgtgcacgcgcgcgtgcacacacacacacacacacacgagttcataatgtggtgatggccctaagttaagcaaaatgcttctgcacacaaaactctctggtttacttcaaattaactctatttaaataaagtctctctgatttttgtgtctcc

SEQ ID NO: 3456 - DNA, 4411 bp, Homo sapiens
tacagccccaaggtcgctccctctggggccctttcttccccattcttcccagcagcccaaagctctggtgggacaggggcagcccctggggagggaggagaggacccaggaacccggctaggagggtggcccacccatttccagtgtgacctgttcccattcccccatgtctcctcccatccctcccgccactcagctcaggctgatgagaagcagagcaacgggtgtatcggtgttttctttcctggtggggtagtggggtggggctgaggagagaaaagggtgattagcgtggggccccgccctcttttgtcctcttcccaggttccctggccccttcggagaaacgcacttggttcgggccagccgcctgaggggacgggctcacgtctgctcctcacactgcagctgctgggccgtggagcttccccaagggagccagggggacttttgccgcagccatgaagggggcacgctggaggagggtcccctgggtgtccctgagctgcctgtgtctctgcctccttccgcatgtggtcccaggaatgacaacaccgtcactgaagacagacggtgggagacgcacagccacatcaccaccccccacaacctcccagaccatcatttccaccattcccagcactgccatgcacacccgctccacagctgcccccatccccatcctgcctgagagaggagtttccctcttcccctatggggcagacgccggggacctggagttcgtcaggaggaccgtggacttcacctccccactcttcaagccggcgactggcttcccccttggctcctctctccgtgattccctctacttcacagacaatggccagatcatcttcccagagtcagactaccagattttctcctaccccaacccactcccaacaggcttcacaggccgggaccctgtggccctggtggctccgttctgggacgatgctgacttctccactggtcgggggaccacattttatcaggaatacgagacgttctatggtgaacacagcctgctagtccagcaggccgagtcttggattagaaagatcacaaacaacgggggctacaaggccaggtgggccctaaaggtcacgtgggtcaatgcccacgcctatcctgcccagtggaccctcgggagcaacacctaccaagccatcctctccacggacgggagcaggtcctatgccctgtttctctaccagagcggtgggatgcagtgggacgtggcccagcgctcaggcaagccggtgctcatgggcttctctagtggagatggctatttcgaaaacagcccactgatgtcccagccagtgtgggagaggtatcgccctgatagattcctgaattccaactcaggcctccaagggctgcagttctacaggctacaccgggaagaaaggcccaactaccgtctcgagtgcctgcagtggctgaagagccagcctcggtggcccagctggggctggaaccaggtctcctgcccttgttcctggcagcagggacgacgggacttacgattccaacccgtcagcataggtcgctggggcctcggcagtaggcagctgtgcagcttcacctcttggcgaggaggcgtgtgctgcagctacgggccctggggagagtttcgtgaaggctggcacgtgcagcgtccttggcagttggcccaggaactggagccacagagctggtgctgccgctggaatgacaagccctacctctgtgccctgtaccagcagaggcggccccacgtgggctgtgctacatacaggcccccacagcccgcctggatgttcggggacccccacatcaccaccttggatggtgtcagttacaccttcaatgggctgggggacttcctgctggtcggggcccaagacgggaactcctccttcctgcttcagggccgcaccgcccagactggctcagcccaggccaccaacttcatcgcctttgcggctcagtaccgctccagcagcctgggccccgtcacggtccaatggctccttgagcctcacgacgcaatccgtgtcctgctggataaccagactgtgacatttcagcctgaccatgaagacggcggaggccaggagacgttcaacgccaccggagtcctcctgagccgcaacggctctgaggtctcggccagcttcgacggctgggccaccgtctcggtgatcgcgctctccaacatcctccacgcctccgccagcctcccgcccgagtaccagaaccgcacggaggggctcctgggggtctggaataacaatccagaggacgacttcaggatgcccaatggctccaccattcccccagggagccctgaggagatgcttttccactttggaatgacctggcagatcaacgggacaggcctccttggcaagaggaatgaccagctgccttccaacttcacccctgttttctactcacaactgcaaaaaaacagctcctgggctgaacatttgatctccaactgtgacggagatagctcatgcatctatgacaccctggccctgcgcaacgcaagcatcggacttcacacgagggaagtcagtaaaaactacgagcaggcgaacgccaccctcaatcagtacccgccctccatcaatggtggtcgtgtgattgaagcctacaaggggcagaccacgctgattcagtacaccagcaatgctgaggatgccaacttcacgctcagagacagctgcaccgacttggagctctttgagaatgggacgttgctgtggacacccaagtcgctggagccattcactctggagattctagcaagaagtgccaagattggcttggcatctgcactccagcccaggactgtggtctgccattgcaatgcagagagccagtgtttgtacaatcagaccagcagggtgggcaactcctccctggaggtggctggctgcaagtgtgacgggggcaccttcggccgctactgcgagggctccgaggatgcctgtgaggagccgtgcttcccgagtgtccactgcgttcctgggaagggctgcgaggcctgccctccaaacctgactggggatgggcggcactgtgcggctctggggagctctttcctgtgtcagaaccagtcctgccctgtgaattactgctacaatcaaggccactgctacatctcccagactctgggctgtcagcccatgtgcacctgccccccagccttcactgacagccgctgcttcctggctgggaacaacttcagtccaactgtcaacctagaacttcccttaagagtcatccagctcttgctcagtgaagaggaaaatgcctccatggcagaggtcaacgcctcggtggcatacagactggggaccctggacatgcgggcctttctccgcaacagccaagtggaacgaatcgattctgcagcaccggcctcgggaagccccatccaacactggatggtcatctcggagttccagtaccgccctcggggcccggtcattgacttcctgaacaaccagctgctggccgcggtggtggaggcgttcttataccacgttccacggaggagtgaggagcccaggaacgacgtggtcttccagcccatctccggggaagacgtgcgcgatgtgacagccctgaacgtgagcacgctgaaggcttacttcagatgcgatggctacaagggctacgacctggtctacagcccccagagcggcttcacctgcgtgtccccgtgcagtaggggctactgtgaccatggaggccagtgccagcacctgcccagtgggccccgctgcagctgtgtgtccttctccatctacacggcctggggcgagcactgtgagcacctgagcatgaaactcgacgcgttcttcggcatcttctttggggccctgggcggcctcttgctgctgggggtcgggacgttcgtggtcctgcgcttctggggttgctccggggccaggttctcctatttcctgaactcagctgaggccttgccttgaaggggcagctgtggcctaggctacctcaagactcacctcatccttaccgcacatttaaggcgccattgcttttgggagactggaaaagggaaggtgactgaaggctgtcaggattcttcaaggagaatgaatactgggaatcaagacaggactataccttatccataggcgcaggtgcacagggggaggccataaagatcaaacatgcatggatgggtcctcacgcagacacacccacagaaggacactagcctggcgcgcgtgcacacacacacacacacacacgagttcataatgtggtgatggccctaagttaagcaaaatgcttctgcacacaaaactctctggtttacttcaaattaactctatttaaataaagtctctctgactttttgtgtctccaaaaaaaaaaaaaaaaa

SEQ ID NO: 3457 - DNA, 4258 bp, Homo sapiens
tacagccccaaggtcgctccctctggggccctttcttccccattcttcccagcagcccaaagctctggtgggacaggggcagcccctggggagggaggagaggacccaggaacccggctaggagggtggcccacccatttccagtgtgacctgttcccattcccccatgtctcctcccatccctcccgccactcagctcaggctgatgagaagcagagcaacgggtgtatcggtgttttctttcctggtggggtagtggggtggggctgaggagagaaaagggtgattagcgtggggccccgccctcttttgtcctcttcccaggttccctggccccttcggagaaacgcacttggttcgggccagccgcctgaggggacgggctcacgtctgctcctcacactgcagctgctgggccgtggagcttccccaagggagccagggggacttttgccgcagccatgaagggggcacgctggaggagggtcccctgggtgtccctgagctgcctgtgtctctgcctccttccgcatgtggtcccaggagtttccctcttcccctatggggcagacgccggggacctggagttcgtcaggaggaccgtggacttcacctccccactcttcaagccggcgactggcttcccccttggctcctctctccgtgattccctctacttcacagacaatggccagatcatcttcccagagtcagactaccagattttctcctaccccaacccactcccaacaggcttcacaggccgggaccctgtggccctggtggctccgttctgggacgatgctgacttctccactggtcgggggaccacattttatcaggaatacgagacgttctatggtgaacacagcctgctagtccagcaggccgagtcttggattagaaagatcacaaacaacgggggctacaaggccaggtgggccctaaaggtcacgtgggtcaatgcccacgcctatcctgcccagtggaccctcgggagcaacacctaccaagccatcctctccacggacgggagcaggtcctatgccctgtttctctaccagagcggtgggatgcagtgggacgtggcccagcgctcaggcaagccggtgctcatgggcttctctagtggagatggctatttcgaaaacagcccactgatgtcccagccagtgtgggagaggtatcgccctgatagattcctgaattccaactcaggcctccaagggctgcagttctacaggctacaccgggaagaaaggcccaactaccgtctcgagtgcctgcagtggctgaagagccagcctcggtggcccagctggggctggaaccaggtctcctgcccttgttcctggcagcagggacgacgggacttacgattccaacccgtcagcataggtcgctggggcctcggcagtaggcagctgtgcagcttcacctcttggcgaggaggcgtgtgctgcagctacgggccctggggagagtttcgtgaaggctggcacgtgcagcgtccttggcagttggcccaggaactggagccacagagctggtgctgccgctggaatgacaagccctacctctgtgccctgtaccagcagaggcggccccacgtgggctgtgctacatacaggcccccacagcccgcctggatgttcggggacccccacatcaccaccttggatggtgtcagttacaccttcaatgggctgggggacttcctgctggtcggggcccaagacgggaactcctccttcctgcttcagggccgcaccgcccagactggctcagcccaggccaccaacttcatcgcctttgcggctcagtaccgctccagcagcctgggccccgtcacggtccaatggctccttgagcctcacgacgcaatccgtgtcctgctggataaccagactgtgacatttcagcctgaccatgaagacggcggaggccaggagacgttcaacgccaccggagtcctcctgagccgcaacggctctgaggtctcggccagcttcgacggctgggccaccgtctcggtgatcgcgctctccaacatcctccacgcctccgccagcctcccgcccgagtaccagaaccgcacggaggggctcctgggggtctggaataacaatccagaggacgacttcaggatgcccaatggctccaccattcccccagggagccctgaggagatgcttttccactttggaatgacctggcagatcaacgggacaggcctccttggcaagaggaatgaccagctgccttccaacttcacccctgttttctactcacaactgcaaaaaaacagctcctgggctgaacatttgatctccaactgtgacggagatagctcatgcatctatgacaccctggccctgcgcaacgcaagcatcggacttcacacgagggaagtcagtaaaaactacgagcaggcgaacgccaccctcaatcagtacccgccctccatcaatggtggtcgtgtgattgaagcctacaaggggcagaccacgctgattcagtacaccagcaatgctgaggatgccaacttcacgctcagagacagctgcaccgacttggagctctttgagaatgggacgttgctgtggacacccaagtcgctggagccattcactctggagattctagcaagaagtgccaagattggcttggcatctgcactccagcccaggactgtggtctgccattgcaatgcagagagccagtgtttgtacaatcagaccagcagggtgggcaactcctccctggaggtggctggctgcaagtgtgacgggggcaccttcggccgctactgcgagggctccgaggatgcctgtgaggagccgtgcttcccgagtgtccactgcgttcctgggaagggctgcgaggcctgccctccaaacctgactggggatgggcggcactgtgcggctctggggagctctttcctgtgtcagaaccagtcctgccctgtgaattactgctacaatcaaggccactgctacatctcccagactctgggctgtcagcccatgtgcacctgccccccagccttcactgacagccgctgcttcctggctgggaacaacttcagtccaactgtcaacctagaacttcccttaagagtcatccagctcttgctcagtgaagaggaaaatgcctccatggcagaggtcaacgcctcggtggcatacagactggggaccctggacatgcgggcctttctccgcaacagccaagtggaacgaatcgattctgcagcaccggcctcgggaagccccatccaacactggatggtcatctcggagttccagtaccgccctcggggcccggtcattgacttcctgaacaaccagctgctggccgcggtggtggaggcgttcttataccacgttccacggaggagtgaggagcccaggaacgacgtggtcttccagcccatctccggggaagacgtgcgcgatgtgacagccctgaacgtgagcacgctgaaggcttacttcagatgcgatggctacaagggctacgacctggtctacagcccccagagcggcttcacctgcgtgtccccgtgcagtaggggctactgtgaccatggaggccagtgccagcacctgcccagtgggccccgctgcagctgtgtgtccttctccatctacacggcctggggcgagcactgtgagcacctgagcatgaaactcgacgcgttcttcggcatcttctttggggccctgggcggcctcttgctgctgggggtcgggacgttcgtggtcctgcgcttctggggttgctccggggccaggttctcctatttcctgaactcagctgaggccttgccttgaaggggcagctgtggcctaggctacctcaagactcacctcatccttaccgcacatttaaggcgccattgcttttgggagactggaaaagggaaggtgactgaaggctgtcaggattcttcaaggagaatgaatactgggaatcaagacaggactataccttatccataggcgcaggtgcacagggggaggccataaagatcaaacatgcatggatgggtcctcacgcagacacacccacagaaggacactagcctggcgcgcgtgcacacacacacacacacacacgagttcataatgtggtgatggccctaagttaagcaaaatgcttctgcacacaaaactctctggtttacttcaaattaactctatttaaataaagtctctctgactttttgtgtctccaaaaaaaaaaaaaaaaa

SEQ ID NO: 3458 - protein, 2169 aa, Homo sapiens
MKGARWRRVPWVSLSCLCLCLLPHVVPGTTEDTLITGSKTPAPVTSTGSTTATLEGQSTAASSRTSNQDISASSQNHQTKSTETTSKAQTDTLTQMMTSTLFSSPSVHNVMETVTQETAPPDEMTTSFPSSVTNTLMMTSKTITMTTSTDSTLGNTEETSTAGTESSTPVTSAVSITAGQEGQSRTTSWRTSIQDTSASSQNHWTRSTQTTRESQTSTLTHRTTSTPSFSPSVHNVTGTVSQKTSPSGETATSSLCSVTNTSMMTSEKITVTTSTGSTLGNPGETSSVPVTGSLMPVTSAALVTVDPEGQSPATFSRTSTQDTTAFSKNHQTQSVETTRVSQINTLNTLTPVTTSTVLSSPSGFNPSGTVSQETFPSGETTISSPSSVSNTFLVTSKVFRMPISRDSTLGNTEETSLSVSGTISAITSKVSTIWWSDTLSTALSPSSLPPKISTAFHTQQSEGAETTGRPHERSSFSPGVSQEIFTLHETTTWPSSFSSKGHTTWSQTELPSTSTGAATRLVTGNPSTGAAGTIPRVPSKVSAIGEPGEPTTYSSHSTTLPKTTGAGAQTQWTQETGTTGEALLSSPSYSVTQMIKTATSPSSSPMLDRHTSQQITTAPSTNHSTIHSTSTSPQESPAVSQRGHTQAPQTTQESQTTRSVSPMTDTKTVTTPGSSFTASGHSPSEIVPQDAPTISAATTFAPAPTGDGHTTQAPTTALQAAPSSHDATLGPSGGTSLSKTGALTLANSVVSTPGGPEGQWTSASASTSPDTAAAMTHTHQAESTEASGQTQTSEPASSGSRTTSAGTATPSSSGASGTTPSGSEGISTSGETTRFSSNPSRDSHTTQSTTELLSASASHGAIPVSTGMASSIVPGTFHPTLSEASTAGRPTGQSSPTSPSASPQETAAISRMAQTQRTRTSRGSDTISLASQATDTFSTVPPTPPSITSSGLTSPQTQTHTLSPSGSGKTFTTALISNATPLPVTSTSSASTGHATPLAVSSATSASTVSSDSPLKMETSGMTTPSLKTDGGRRTATSPPPTTSQTIISTIPSTAMHTRSTAAPIPILPERGVSLFPYGADAGDLEFVRRTVDFTSPLFKPATGFPLGSSLRDSLYFTDNGQIIFPESDYQIFSYPNPLPTGFTGRDPVALVAPFWDDADFSTGRGTTFYQEYETFYGEHSLLVQQAESWIRKITNNGGYKARWALKVTWVNAHAYPAQWTLGSNTYQAILSTDGSRSYALFLYQSGGMQWDVAQRSGKPVLMGFSSGDGFFENSPLMSQPVWERYRPDRFLNSNSGLQGLQFYGLHREERPNYRLECLQWLKSQPRWPSWGWNQVSCPCSWQQGRRDLRFQPVSIGRWGLGSRQLCSFTSWRGGVCCSYGPWGEFREGWHVQRPWQLAQELEPQSWCCRWNDKPYLCALYQQRRPHVGCATYRPPQPAWMFGDPHITTLDGVSYTFNGLGDFLLVGAQDGNSSFLLQGRTAQTGSAQATNFIAFAAQYRSSSLGPVTVQWLLEPHDAIRVLLDNQTVTFQPDHEDGGGQETFNATGVLLSRNGSEASASFDGWATVSVIALSNILHSSASLPPEYQNRTEGLLGVWNNNPEDDFRMPNGSTIPPGSPEEMLFHFGMTWQINGTGLLGKRNDQLPSNFTPVFYSQLQKNSSWAEHLISNCDGDSSCIYDTLALRNASIGLHTREVSKNYEQANATLNQYPPSINGGRVIEAYKGQTTLIQYTSNAEDANFTLRDSCTDLELFENGTLLWTPKSLEPFTLEILARSAKIGLASALQPRTVVCHCNAESQCLYNQTSRVGNSSLEVAGCKCDGGTFGRYCEGSEDACEEPCFPSVHCVPGKGCEACPPNLTGDGRHCAALGSSFLCQNQSCPVNYCYNQGHCYISQTLGCQPMCTCPPAFTDSRCFLAGNNFSPTVNLELPLRVIQLLLSEEENASMAEVNASVAYRLGTLDMRAFLRNSQVERIDSAAPASGSPIQHWMVISEFQYRPRGPVIDFLNNQLLAAVVEAFLYHVPRRSEEPRNDVVFQPISGEDVRDVTALNVSTLKAYFRCDGYKGYDLVYSPQSGFTCVSPCSRGYCDHGGQCQHLPSGPRCSCVSFSIYTAWGEHCEHLSMKLDAFFGIFFGALGGLLLLGVGTFVVLRFWGCSGARFSYFLNSAEALP

SEQ ID NO: 3459 - protein, 1255 aa, Homo sapiens
MKGARWRRVPWVSLSCLCLCLLPHVVPGTTEDTLITGSKTPAPVTSTGSTTATLEGQSTAASSRTSNQDISASSQNHQTKSTETTSKAQTDTLTQMMTSTLFSSPSVHNVMETVTQETAPPDEMTTSFPSSVTNTLMMTSKTITMTTSTDSTLGNTEETSTAGTESSTPVTSAVSITAGQEGQSRTTSWRTSIQDTSASSQNHWTRSTQTTRESQTSTLTHRTTSTPSFSPSVHNVTGTVSQKTSPSGETATSSLCSVTNTSMMTSEKITVTTSTGSTLGNPGETSSVPVTGSLMPVTSAALVTVDPEGQSPATFSRTSTQDTTAFSKNHQTQSVETTRVSQINTLNTLTPVTTSTVLSSPSGFNPSGTVSQETFPSGETTISSPSSVSNTFLVTSKVFRMPISRDSTLGNTEETSLSVSGTISAITSKVSTIWWSDTLSTALSPSSLPPKISTAFHTQQSEGAETTGRPHERSSFSPGVSQEIFTLHETTTWPSSFSSKGHTTWSQTELPSTSTGAATRLVTGNPSTGAAGTIPRVPSKVSAIGEPGEPTTYSSHSTTLPKTTGAGAQTQWTQETGTTGEALLSSPSYSVTQMIKTATSPSSSPMLDRHTSQQITTAPSTNHSTIHSTSTSPQESPAVSQRGHTQAPQTTQESQTTRSVSPMTDTKTVTTPGSSFTASGHSPSEIVPQDAPTISAATTFAPAPTGDGHTTQAPTTALQAAPSSHDATLGPSGGTSLSKTGALTLANSVVSTPGGPEGQWTSASASTSPDTAAAMTHTHQAESTEASGQTQTSEPASSGSRTTSAGTATPSSSGASGTTPSGSEGISTSGETTFSSNPSRDSHTTQSTTELLSASASHGAIPVSTGMASSIVPGTFHPTLSEASTAGRPTGQSSPTSPSASPQETAAISRMAQTQRTRTSRGSDTISLASQATDTFSTVPPTPPSITSSGLTSPQTQTHTLSPSGSGKTFTTALISNATPLPVTSTSSASTGHATPLAVSSATSASTVSSDSPLKMETSGMTTPSLKTDGGRRTATSPPPTTSQTIISTIPSTAMHTRSTAAPIPILPERGVSLFPYGADAGDLEFVRRTVDFTSPLFKPATGFPLGSSLRDSLYFTDNGQIIFPESDYQIFSYPNPLPTGFTGRDPVALVAPFWDDADFSTGRGTTFYQEYETFYGEHSLLVQQAESWIRKITNNGGYKARWALKVTWVNAHAYPAQWTLGSNTYQAILSTDGSRSYALFLYQSGGMQWDVAQL

SEQ ID NO: 3460 - protein, 1827 aa, Homo sapiens
MKGARWRRVPWVSLSCLCLCLLPHVVPGTTEDTLITGSKTPAPVTSTGSTTATLEGQSTAASSRTSNQDISASSQNHQTKSTETTSKAQTDTLTQMMTSTLFSSPSVHNVMETVTQETAPPDEMTTSFPSSVTNTLMMTSKTITMTTSTDSTLGNTEETSTAGTESSTPVTSAVSITAGQEGQSRTTSWRTSIQDTSASSQNHWTRSTQTTRESQTSTLTHRTTSTPSFSPSVHNVTGTVSQKTSPSGETATSSLCSVTNTSMMTSEKITVTTSTGSTLGNPGETSSVPVTGSLMPVTSAALVTVDPEGQSPATFSRTSTQDTTAFSKNHQTQSVETTRVSQINTLNTLTPVTTSTVLSSPSGFNPSGTVSQETFPSGETTISSPSSVSNTFLVTSKVFRMPISRDSTLGNTEETSLSVSGTISAITSKVSTIWWSDTLSTALSPSSLPPKISTAFHTQQSEGAETTGRPHERSSFSPGVSQEIFTLHETTTWPSSFSSKGHTTWSQTELPSTSTGAATRLVTGNPSTGAAGTIPRVPSKVSAIGEPGEPTTYSSHSTTLPKTTGAGAQTQWTQETGTTGEALLSSPSYSVTQMIKTATSPSSSPMLDRHTSQQITTAPSTNHSTIHSTSTSPQESPAVSQRGHTQAPQTTQESQTTRSVSPMTDTKTVTTPGSSFTASGHSPSEIVPQDAPTISAATTFAPAPTGDGHTTQAPTTALQAAPSSHDATLGPSGGTSLSKTGALTLANSVVSTPGGPEGQWTSASASTSPDTAAAMTHTHQAESTEASGQTQTSEPASSGSRTTSAGTATPSSSGASGTTPSGSEGISTSGETTRFSSNPSRDSHTTQSTTELLSASASHGAIPVSTGMASSIVPGTFHPTLSEASTAGRPTGQSSPTSPSASPQETAAISRMAQTQRTRTSRGSDTISLASQATDTFSTVPPTPPSITSSGLTSPQTQTHTLSPSGSGKTFTTALISNATPLPVTSTSSASTGHATPLAVSSATSASTVSSDSPLKMETSGMTTPSLKTDGGRRTATSPPPTTSQTIISTIPSTAMHTRSTAAPIPILPERGVSLFPYGADAGDLEFVRRTVDFTSPLFKPATGFPLGSSLRDSLYFTDNGQIIFPESDYQIFSYPNPLPTGFTGRDPVALVAPFWDDADFSTGRGTTFYQEYETFYGEHSLLVQQAESWIRKITNNGGYKARWALKVTWVNAHAYPAQWTLGSNTYQAILSTDGSRSYALFLYQSGGMQWDVAQRSGKPVLMGFSSGDGFFENSPLMSQPVWERYRPDRFLNSNSGLQGLQFYGLHREERPNYRLECLQWLKSQPRWPSWGWNQVSCPCSWQQGRRDLRFQPVSIGRWGLGSRQLCSFTSWRGGVCCSYGPWGEFREGWHVQRPWQLAQELEPQSWCCRWNDKPYLCALYQQRRPHVGCATYRPPQPAWMFGDPHITTLDGVSYTFNGLGDFLLVGAQDGNSSFLLQGRTAQTGSAQATNFIAFAAQYRSSSLGPVTVQWLLEPHDAIRVLLDNQTVTFQPDHEDGGGQETFNATGVLLSRNGSEASASFDGWATVSVIALSNILHSSASLPPEYQNRTEGLLGVWNNNPEDDFRMPNGSTIPPGSPEEMLFHFGMTWQINGTGLLGKRNDQLPSNFTPVFYSQLQKNSSWAEHLISNCDGDSSCIYDTLALRNASIGLHTREVSKNYEQANATLNQYPPSINGGRVIEAYKGQTTLIQYTSNAEDANFTLRDSCTDLELFENGTLLWTPKSLEPFTLEILARSAKIGLASALQPRTVVCHCNAESQCLYNQTSRVGNSSLELWGALSCVRTSPAL

SEQ ID NO: 3461 - protein, 1176 aa, Homo sapiens
MKGARWRRVPWVSLSCLCLCLLPHVVPGMTTPSLKTDGGRRTATSPPPTTSQTIISTIPSTAMHTRSTAAPIPILPERGVSLFPYGADAGDLEFVRRTVDFTSPLFKPATGFPLGSSLRDSLYFTDNGQIIFPESDYQIFSYPNPLPTGFTGRDPVALVAPFWDDADFSTGRGTTFYQEYETFYGEHSLLVQQAESWIRKITNNGGYKARWALKVTWVNAHAYPAQWTLGSNTYQAILSTDGSRSYALFLYQSGGMQWDVAQRSGKPVLMGFSSGDGYFENSPLMSQPVWERYRPDRFLNSNSGLQGLQFYRLHREERPNYRLECLQWLKSQPRWPSWGWNQVSCPCSWQQGRRDLRFQPVSIGRWGLGSRQLCSFTSWRGGVCCSYGPWGEFREGWHVQRPWQLAQELEPQSWCCRWNDKPYLCALYQQRRPHVGCATYRPPQPAWMFGDPHITTLDGVSYTFNGLGDFLLVGAQDGNSSFLLQGRTAQTGSAQATNFIAFAAQYRSSSLGPVTVQWLLEPHDAIRVLLDNQTVTFQPDHEDGGGQETFNATGVLLSRNGSEVSASFDGWATVSVIALSNILHASASLPPEYQNRTEGLLGVWNNNPEDDFRMPNGSTIPPGSPEEMLFHFGMTWQINGTGLLGKRNDQLPSNFTPVFYSQLQKNSSWAEHLISNCDGDSSCIYDTLALRNASIGLHTREVSKNYEQANATLNQYPPSINGGRVIEAYKGQTTLIQYTSNAEDANFTLRDSCTDLELFENGTLLWTPKSLEPFTLEILARSAKIGLASALQPRTVVCHCNAESQCLYNQTSRVGNSSLEVAGCKCDGGTFGRYCEGSEDACEEPCFPSVHCVPGKGCEACPPNLTGDGRHCAALGSSFLCQNQSCPVNYCYNQGHCYISQTLGCQPMCTCPPAFTDSRCFLAGNNFSPTVNLELPLRVIQLLLSEEENASMAEVNASVAYRLGTLDMRAFLRNSQVERIDSAAPASGSPIQHWMVISEFQYRPRGPVIDFLNNQLLAAVVEAFLYHVPRRSEEPRNDVVFQPISGEDVRDVTALNVSTLKAYFRCDGYKGYDLVYSPQSGFTCVSPCSRGYCDHGGQCQHLPSGPRCSCVSFSIYTAWGEHCEHLSMKLDAFFGIFFGALGGLLLLGVGTFVVLRFWGCSGARFSYFLNSAEALP

SEQ ID NO: 3462 - protein, 1125 aa, Homo sapiens
MKGARWRRVPWVSLSCLCLCLLPHVVPGVSLFPYGADAGDLEFVRRTVDFTSPLFKPATGFPLGSSLRDSLYFTDNGQIIFPESDYQIFSYPNPLPTGFTGRDPVALVAPFWDDADFSTGRGTTFYQEYETFYGEHSLLVQQAESWIRKITNNGGYKARWALKVTWVNAHAYPAQWTLGSNTYQAILSTDGSRSYALFLYQSGGMQWDVAQRSGKPVLMGFSSGDGYFENSPLMSQPVWERYRPDRFLNSNSGLQGLQFYRLHREERPNYRLECLQWLKSQPRWPSWGWNQVSCPCSWQQGRRDLRFQPVSIGRWGLGSRQLCSFTSWRGGVCCSYGPWGEFREGWHVQRPWQLAQELEPQSWCCRWNDKPYLCALYQQRRPHVGCATYRPPQPAWMFGDPHITTLDGVSYTFNGLGDFLLVGAQDGNSSFLLQGRTAQTGSAQATNFIAFAAQYRSSSLGPVTVQWLLEPHDAIRVLLDNQTVTFQPDHEDGGGQETFNATGVLLSRNGSEVSASFDGWATVSVIALSNILHASASLPPEYQNRTEGLLGVWNNNPEDDFRMPNGSTIPPGSPEEMLFHFGMTWQINGTGLLGKRNDQLPSNFTPVFYSQLQKNSSWAEHLISNCDGDSSCIYDTLALRNASIGLHTREVSKNYEQANATLNQYPPSINGGRVIEAYKGQTTLIQYTSNAEDANFTLRDSCTDLELFENGTLLWTPKSLEPFTLEILARSAKIGLASALQPRTVVCHCNAESQCLYNQTSRVGNSSLEVAGCKCDGGTFGRYCEGSEDACEEPCFPSVHCVPGKGCEACPPNLTGDGRHCAALGSSFLCQNQSCPVNYCYNQGHCYISQTLGCQPMCTCPPAFTDSRCFLAGNNFSPTVNLELPLRVIQLLLSEEENASMAEVNASVAYRLGTLDMRAFLRNSQVERIDSAAPASGSPIQHWMVISEFQYRPRGPVIDFLNNQLLAAVVEAFLYHVPRRSEEPRNDVVFQPISGEDVRDVTALNVSTLKAYFRCDGYKGYDLVYSPQSGFTCVSPCSRGYCDHGGQCQHLPSGPRCSCVSFSIYTAWGEHCEHLSMKLDAFFGIFFGALGGLLLLGVGTFVVLRFWGCSGARFSYFLNSAEALP

1. An array comprising a plurality of nucleic acid molecules selected from the group consisting of: the nucleotide sequences set forth in SEQ ID NOs: 1-1146, 3439-3445, and 3452-3457, their complements and hybridizing fragments thereof.

2-22. (canceled)

23. A method of associating a plurality of molecules selected from the group consisting of nucleic acid molecules, protein molecules and fragments thereof comprising the steps of:
(a) querying a sequence database for the presence of transmembrane molecules using a transmembrane protein topology prediction program to provide a transmembrane selection set;
(b) comparing homology of the molecules of the transmembrane selection set with array associated molecules; and
(c) excluding those molecules from the transmembrane selection set exhibiting substantial homology with one or more array associated molecules to provide a transmembrane signature set comprising a plurality of molecules.

24-41. (canceled)

42. A method for treating a hyperproliferative disease in an animal, comprising administering to an animal in need of treatment a composition comprising a binding molecule which specifically binds to a polypeptide, variant, or fragment thereof, wherein said polypeptide, variant, or fragment thereof is selected from the group consisting of:
(i) a colon tumor-associated polypeptide;
(ii) a lung tumor-associated polypeptide;
(iii) a pancreatic tumor-associated polypeptide; and
(iv) an ovarian tumor-associated polypeptide.

43. A method for treating a hyperproliferative disorder in an animal, comprising administering to an animal in need of treatment a composition comprising a binding molecule which specifically binds to a polypeptide, variant, or fragment thereof, which is at least 70% identical to a colon tumor-associated polypeptide selected from the group consisting of:
(i) SEQ ID NO:1288;
(ii) SEQ ID NO:3446;
(iii) SEQ ID NO:3447;
(iv) SEQ ID NO:3448;
(v) SEQ ID NO:3449;
(vi) SEQ ID NO:3450;
(vii) SEQ ID NO:3451;
(viii) SEQ ID NO:3452;
(ix) SEQ ID NO:3458;
(x) SEQ ID NO:3459;
(xi) SEQ ID NO:3460;
(xii) SEQ ID NO:3461; and
(xiii) SEQ ID NO:3462.

44-46. (canceled)

47. The method of claim 46, wherein said polypeptide, variant, or fragment thereof, is at least 90% identical to said colon tumor-associated polypeptide.

48. The method of claim 47, wherein said polypeptide, variant, or fragment thereof, is at least 95% identical to said colon tumor-associated polypeptide.

49. The method of claim 48, wherein said polypeptide, variant, or fragment thereof, is 100% identical to said colon tumor-associated polypeptide.

50. The method of claim 42, wherein said polypeptide, variant, or fragment thereof, is selected from the group consisting of:
(i) amino acids 193-218 of SEQ ID NO:3446; and
(ii) amino acids 349-626 of SEQ ID NO:3446.

51. The method of claim 42, wherein said polypeptide, variant, or fragment thereof, is selected from the group consisting of:
(i) amino acids 1-129 of SEQ ID NO:3447;
(ii) amino acids 1-23 of SEQ ID NO:3447;
(iii) amino acids 5-223 of SEQ ID NO:3447;
(iv) amino acids 5-131 of SEQ ID NO:3447;
(v) amino acids 5-510 of SEQ ID NO:3447;
(vi) amino acids 12-220 of SEQ ID NO:3447;
(vii) amino acids 20-227 of SEQ ID NO:3447;
(viii) amino acids 25-145 of SEQ ID NO:3447;
(ix) amino acids 28-232 of SEQ ID NO:3447;
(x) amino acids 29-391 of SEQ ID NO:3447;
(xi) amino acids 30-457 of SEQ ID NO:3447;
(xii) amino acids 30-427 of SEQ ID NO:3447;
(xiii) amino acids 34-216 of SEQ ID NO:3447;
(xiv) amino acids 35-457 of SEQ ID NO:3447;
(xv) amino acids 37-59 of SEQ ID NO:3447;
(xvi) amino acids 38-140 of SEQ ID NO:3447;
(xvii) amino acids 38-212 of SEQ ID NO:3447;
(xviii) amino acids 62-458 of SEQ ID NO:3447;
(xix) amino acids 66-303 of SEQ ID NO:3447;
(xx) amino acids 72-94 of SEQ ID NO:3447;
(xxi) amino acids 97-250 of SEQ ID NO:3447;
(xxii) amino acids 105-207 of SEQ ID NO:3447;
(xxiii) amino acids 106-259 of SEQ ID NO:3447;
(xxiv) amino acids 106-458 of SEQ ID NO:3447;
(xxv) amino acids 109-131 of SEQ ID NO:3447;
(xxvi) amino acids 147-429 of SEQ ID NO:3447;
(xxvii) amino acids 152-174 of SEQ ID NO:3447;
(xxviii) amino acids 176-289 of SEQ ID NO:3447;
(xxix) amino acids 197-417 of SEQ ID NO:3447;
(xxx) amino acids 197-422 of SEQ ID NO:3447;
(xxxi) amino acids 198-220 of SEQ ID NO:3447;
(xxxii) amino acids 202-239 of SEQ ID NO:3447;
(xxxiii) amino acids 207-279 of SEQ ID NO:3447;
(xxxiv) amino acids 212-407 of SEQ ID NO:3447;
(xxxv) amino acids 217-271 of SEQ ID NO:3447;
(xxxvi) amino acids 220-256 of SEQ ID NO:3447;
(xxxvii) amino acids 221-297 of SEQ ID NO:3447;
(xxxviii) amino acids 243-401 of SEQ ID NO:3447;
(xxxix) amino acids 247-321 of SEQ ID NO:3447;
(xl) amino acids 247-263 of SEQ ID NO:3447;
(xli) amino acids 271-364 of SEQ ID NO:3447;
(xlii) amino acids 271-338 of SEQ ID NO:3447;
(xliii) amino acids 278-371 of SEQ ID NO:3447;
(xliv) amino acids 292-301 of SEQ ID NO:3447;
(xlv) amino acids 312-373 of SEQ ID NO:3447;
(xlvi) amino acids 321-481 of SEQ ID NO:3447;
(xlvii) amino acids 369-470 of SEQ ID NO:3447;
(xlviii) amino acids 379-395 of SEQ ID NO:3447;
(xlix) amino acids 387-402 of SEQ ID NO:3447;
(l) amino acids 406-428 of SEQ ID NO:3447; and
(li) amino acids 418-464 of SEQ ID NO:3447.

52. The method of claim 42, wherein said polypeptide, variant, or fragment thereof, is selected from the group consisting of:
(i) amino acids 1-43 of SEQ ID NO:3448; and
(ii) amino acids 29-51 of SEQ ID NO:3448.

53. The method of claim 42, wherein said polypeptide, variant, or fragment thereof, is selected from the group consisting of:
(i) amino acids 1-21 of SEQ ID NO:3449;
(ii) amino acids 41-287 of SEQ ID NO:3449;
(iii) amino acids 25-47 of SEQ ID NO:3449;
(iv) amino acids 59-78 of SEQ ID NO:3449;
(v) amino acids 98-120 of SEQ ID NO:3449;
(vi) amino acids 141-163 of SEQ ID NO:3449;
(vii) amino acids 200-222 of SEQ ID NO:3449;
(viii) amino acids 243-265 of SEQ ID NO:3449; and
(ix) amino acids 270-289 of SEQ ID NO:3449.

54. The method of claim 42, wherein said polypeptide, variant, or fragment thereof, is selected from the group consisting of:
(i) amino acids 1-39 of SEQ ID NO:3450;
(ii) amino acids 41-290 of SEQ ID NO:3450;
(iii) amino acids 26-48 of SEQ ID NO:3450;
(iv) amino acids 61-83 of SEQ ID NO:3450;
(v) amino acids 98-120 of SEQ ID NO:3450;
(vi) amino acids 144-166 of SEQ ID NO:3450;
(vii) amino acids 199-221 of SEQ ID NO:3450;
(viii) amino acids 241-263 of SEQ ID NO:3450; and
(ix) amino acids 273-292 of SEQ ID NO:3450.

55. The method of claim 42, wherein said polypeptide, variant, or fragment thereof, is selected from the group consisting of:
(i) amino acids 125-139 of SEQ ID NO:3451;
(ii) amino acids 1-123 of SEQ ID NO:3451;
(iii) amino acids 1-83 of SEQ ID NO:3451;
(iv) amino acids 3-72 of SEQ ID NO:3451;
(v) amino acids 4-77 of SEQ ID NO:3451;
(vi) amino acids 7-109 of SEQ ID NO:3451;
(vii) amino acids 8-119 of SEQ ID NO:3451;
(viii) amino acids 14-108 of SEQ ID NO:3451;
(ix) amino acids 17-107 of SEQ ID NO:3451;
(x) amino acids 24-99 of SEQ ID NO:3451;
(xi) amino acids 25-137 of SEQ ID NO:3451;
(xii) amino acids 25-124 of SEQ ID NO:3451;
(xiii) amino acids 27-87 of SEQ ID NO:3451;
(xiv) amino acids 30-119 of SEQ ID NO:3451;
(xv) amino acids 30-50 of SEQ ID NO:3451;
(xvi) amino acids 32-58 of SEQ ID NO:3451;
(xvii) amino acids 41-112 of SEQ ID NO:3451;
(xviii) amino acids 44-119 of SEQ ID NO:3451;
(xix) amino acids 44-123 of SEQ ID NO:3451;
(xx) amino acids 53-108 of SEQ ID NO:3451;
(xxi) amino acids 60-128 of SEQ ID NO:3451;
(xxii) amino acids 63-115 of SEQ ID NO:3451;
(xxiii) amino acids 63-84 of SEQ ID NO:3451;
(xxiv) amino acids 63-102 of SEQ ID NO:3451;
(xxv) amino acids 65-94 of SEQ ID NO:3451;
(xxvi) amino acids 67-140 of SEQ ID NO:3451;
(xxvii) amino acids 69-113 of SEQ ID NO:3451;
(xxviii) amino acids 69-128 of SEQ ID NO:3451;
(xxix) amino acids 95-117 of SEQ ID NO:3451; and
(xxx) amino acids 110-124 of SEQ ID NO:3451.

56. The method of claim 42, wherein said polypeptide, variant, or fragment thereof, is selected from the group consisting of:
(i) amino acids 39-285 of SEQ ID NO:3452;
(ii) amino acids 1-49 of SEQ ID NO:3452;
(iii) amino acids 31-53 of SEQ ID NO:3452;
(iv) amino acids 58-80 of SEQ ID NO:3452;
(v) amino acids 100-122 of SEQ ID NO:3452;
(vi) amino acids 143-165 of SEQ ID NO:3452;
(vii) amino acids 201-223 of SEQ ID NO:3452;
(viii) amino acids 236-258 of SEQ ID NO:3452; and
(ix) amino acids 268-287 of SEQ ID NO:3452.

57. The method of claim 42, wherein said polypeptide, variant, or fragment thereof is selected from the group consisting of:
(i) amino acids 1-627 of SEQ ID NO:3446;
(ii) amino acids 1-36 of SEQ ID NO:3447;
(iii) amino acids 95-108 of SEQ ID NO:3447;
(iv) amino acids 175-197 of SEQ ID NO:3447;
(v) amino acids 429-437 of SEQ ID NO:3447;
(vi) amino acids 1-28 of SEQ ID NO:3448;
(vii) amino acids 1-24 of SEQ ID NO:3449;
(viii) amino acids 79-97 of SEQ ID NO:3449;
(ix) amino acids 164-199 of SEQ ID NO:3449;
(x) amino acids 166-169 of SEQ ID NO:3449;
(xi) amino acids 1-25 of SEQ ID NO:3450;
(xii) amino acids 84-87 of SEQ ID NO:3450;
(xiii) amino acids 167-198 of SEQ ID NO:3450;
(xiv) amino acids 264-272 of SEQ ID NO:3450;
(xv) amino acids 1-30 of SEQ ID NO:3452;
(xvi) amino acids 81-99 of SEQ ID NO:3452;
(xvii) amino acids 166-200 of SEQ ID NO:3452; and
(xviii) amino acids 259-267 of SEQ ID NO:3452.

58. The method of claim 42, wherein said polypeptide, variant, or fragment thereof, is selected from the group consisting of:
(i) amino acids 1154-1311 of SEQ ID NO:3458;
(ii) amino acids 1310-1425 of SEQ ID NO:3458;
(iii) amino acids 1428-1610 of SEQ ID NO:3458;
(iv) amino acids 1834-1866 of SEQ ID NO:3458;
(v) amino acids 1873-1914 of SEQ ID NO:3458;
(vi) amino acids 2080-2117 of SEQ ID NO:3458;
(vii) amino acids 2129-2151 of SEQ ID NO:3458;
(viii) amino acids 40-344 of SEQ ID NO:3458;
(ix) amino acids 66-122 of SEQ ID NO:3458;
(x) amino acids 69-273 of SEQ ID NO:3458;
(xi) amino acids 145-311 of SEQ ID NO:3458;
(xii) amino acids 205-328 of SEQ ID NO:3458;
(xiii) amino acids 223-304 of SEQ ID NO:3458;
(xiv) amino acids 358-385 of SEQ ID NO:3458;
(xv) amino acids 372-470 of SEQ ID NO:3458;
(xvi) amino acids 715-763 of SEQ ID NO:3458;
(xvii) amino acids 895-967 of SEQ ID NO:3458;
(xviii) amino acids 909-940 of SEQ ID NO:3458;
(xix) amino acids 957-1155 of SEQ ID NO:3458;
(xx) amino acids 1118-1264 of SEQ ID NO:3458;
(xxi) amino acids 1350-1577 of SEQ ID NO:3458;
(xxii) amino acids 1365-1422 of SEQ ID NO:3458;
(xxiii) ‘amino acids 1469-1661 of SEQ ID NO:3458;
(xxiv) amino acids 1471-1509 of SEQ ID NO:3458;
(xxv) amino acids 1641-1665 of SEQ ID NO:3458;
(xxvi) amino acids 1652-1750 of SEQ ID NO:3458;
(xxvii) amino acids 1661-1689 of SEQ ID NO:3458;
(xxviii) amino acids 1710-1845 of SEQ ID NO:3458;
(xxix) amino acids 1716-1794 of SEQ ID NO:3458;
(xxx) amino acids 1793-1833 of SEQ ID NO:3458;
(xxxi) amino acids 1799-1854 of SEQ ID NO:3458;
(xxxii) amino acids 1814-1885 of SEQ ID NO:3458;
(xxxiii) amino acids 1817-1865 of SEQ ID NO:3458;
(xxxiv) amino acids 1825-1874 of SEQ ID NO:3458;
(xxxv) amino acids 1825-1885 of SEQ ID NO:3458;
(xxxvi) amino acids 1829-1953 of SEQ ID NO:3458;
(xxxvii) amino acids 1829-1891 of SEQ ID NO:3458;
(xxxviii) amino acids 1833-1877 of SEQ ID NO:3458;
(xxxix) amino acids 1840-1896 of SEQ ID NO:3458;
(xl) amino acids 1844-1865 of SEQ ID NO:3458;
(xli) amino acids 1846-1890 of SEQ ID NO:3458;
(xlii) amino acids 1848-1886 of SEQ ID NO:3458;
(xliii) amino acids 1850-1885 of SEQ ID NO:3458;
(xliv) amino acids 1851-1884 of SEQ ID NO:3458;
(xlv) amino acids 1852-1900 of SEQ ID NO:3458;
(xlvi) amino acids 1854-1902 of SEQ ID NO:3458;
(xlvii) amino acids 1860-1894 of SEQ ID NO:3458;
(xlviii) amino acids 1865-1898 of SEQ ID NO:3458;
(xlix) amino acids 1873-1898 of SEQ ID NO:3458;
(l) amino acids 1873-1902 of SEQ ID NO:3458;
(li) amino acids 1874-1913 of SEQ ID NO:3458;
(lii) amino acids 1879-1902 of SEQ ID NO:3458;
(liii) amino acids 1890-1940 of SEQ ID NO:3458;
(liv) amino acids 1897-1934 of SEQ ID NO:3458;
(lv) amino acids 1968-2082 of SEQ ID NO:3458;
(lvi) amino acids 2058-2117 of SEQ ID NO:3458;
(lvii) amino acids 2072-2096 of SEQ ID NO:3458;
(lviii) amino acids 2080-2102 of SEQ ID NO:3458;
(lix) amino acids 2081-2117 of SEQ ID NO:3458; and
(lx) amino acids 2082-2113 of SEQ ID NO:3458

59. The method of claim 42, wherein said polypeptide, variant, or fragment thereof, is selected from the group consisting of:
(i) amino acids 1153-1255 of SEQ ID NO:3459;
(ii) amino acids 23-163 of SEQ ID NO:3459;
(iii) amino acids 40-344 of SEQ ID NO:3459;
(iv) amino acids 66-122 of SEQ ID NO:3459;
(v) amino acids 69-273 of SEQ ID NO:3459;
(vi) amino acids 145-311 of SEQ ID NO:3459;
(vii) amino acids 205-328 of SEQ ID NO:3459;
(viii) amino acids 223-304 of SEQ ID NO:3459;
(ix) amino acids 358-385 of SEQ ID NO:3459;
(x) amino acids 372-470 of SEQ ID NO:3459;
(xi) amino acids 594-702 of SEQ ID NO:3459;
(xii) amino acids 715-763 of SEQ ID NO:3459;
(xiii) amino acids 743-857 of SEQ ID NO:3459;
(xiv) amino acids 831-968 of SEQ ID NO:3459;
(xv) amino acids 894-966 of SEQ ID NO:3459;
(xvi) amino acids 908-939 of SEQ ID NO:3459;
(xvii) amino acids 956-1154 of SEQ ID NO:3459

60. The method of claim 42, wherein said polypeptide, variant, or fragment thereof, is selected from the group consisting of:
(i) amino acids 1154-1311 of SEQ ID NO:3460;
(ii) amino acids 1310-1425 of SEQ ID NO:3460;
(iii) amino acids 1428-1610 of SEQ ID NO:3460;
(iv) amino acids 40-344 of SEQ ID NO:3460;
(v) amino acids 66-122 of SEQ ID NO:3460;
(vi) amino acids 69-273 of SEQ ID NO:3460;
(vii) amino acids 145-311 of SEQ ID NO:3460;
(viii) amino acids 205-328 of SEQ ID NO:3460;
(ix) amino acids 223-304 of SEQ ID NO:3460;
(x) amino acids 358-385 of SEQ ID NO:3460;
(xi) amino acids 372-470 of SEQ ID NO:3460;
(xii) amino acids 594-702 of SEQ ID NO:3460;
(xiii) amino acids 715-763 of SEQ ID NO:3460;
(xiv) amino acids 895-967 of SEQ ID NO:3460;
(xv) amino acids 909-940 of SEQ ID NO:3460;
(xvi) amino acids 957-1155 of SEQ ID NO:3460;
(xvii) amino acids 1118-1264 of SEQ ID NO:3460;
(xviii) amino acids 1350-1577 of SEQ ID NO:3460;
(xix) amino acids 1363-1378 of SEQ ID NO:3460;
(xx) amino acids 1365-1422 of SEQ ID NO:3460;
(xxi) amino acids 1377-1409 of SEQ ID NO:3460;
(xxii) amino acids 1469-1661 of SEQ ID NO:3460;
(xxiii) amino acids 1471-1509 of SEQ ID NO:3460;
(xxiv) amino acids 1641-1665 of SEQ ID NO:3460;
(xxv) amino acids 1652-1750 of SEQ ID NO:3460;
(xxvi) amino acids 1661-1689 of SEQ ID NO:3460;
(xxvii) amino acids 1716-1794 of SEQ ID NO:3460;
(xxviii) amino acids 1785-1826 of SEQ ID NO:3460;
(xxix) amino acids 1790-1820 of SEQ ID NO:3460

61. The method of claim 42, wherein said polypeptide, variant, or fragment thereof, is selected from the group consisting of:
(i) amino acids 161-318 of SEQ ID NO:3461;
(ii) amino acids 317-432 of SEQ ID NO:3461;
(iii) amino acids 435-617 of SEQ ID NO:3461;
(iv) amino acids 841-873 of SEQ ID NO:3461;
(v) amino acids 880-921 of SEQ ID NO:3461;
(vi) amino acids 1087-1124 of SEQ ID NO:3461;
(vii) amino acids 1136-1158 of SEQ ID NO:3461;
(viii) amino acids 125-271 of SEQ ID NO:3461;
(ix) amino acids 214-252 of SEQ ID NO:3461;
(x) amino acids 357-584 of SEQ ID NO:3461;
(xi) amino acids 372-429 of SEQ ID NO:3461;
(xii) amino acids 476-668 of SEQ ID NO:3461;
(xiii) amino acids 478-516 of SEQ ID NO:3461;
(xiv) amino acids 480-510 of SEQ ID NO:3461;
(xv) amino acids 648-672 of SEQ ID NO:3461;
(xvi) amino acids 659-757 of SEQ ID NO:3461;
(xvii) amino acids 668-696 of SEQ ID NO:3461;
(xviii) amino acids 717-852 of SEQ ID NO:3461;
(xix) amino acids 723-801 of SEQ ID NO:3461;
(xx) amino acids 800-840 of SEQ ID NO:3461;
(xxi) amino acids 806-861 of SEQ ID NO:3461;
(xxii) amino acids 821-892 of SEQ ID NO:3461;
(xxiii) amino acids 824-872 of SEQ ID NO:3461;
(xxiv) amino acids 832-881 of SEQ ID NO:3461;
(xxv) amino acids 832-892 of SEQ ID NO:3461;
(xxvi) amino acids 836-960 of SEQ ID NO:3461;
(xxvii) amino acids 836-898 of SEQ ID NO:3461;
(xxviii) amino acids 840-884 of SEQ ID NO:3461;
(xxix) amino acids 847-903 of SEQ ID NO:3461;
(xxx) amino acids 851-872 of SEQ ID NO:3461;
(xxxi) amino acids 853-897 of SEQ ID NO:3461;
(xxxii) amino acids 855-893 of SEQ ID NO:3461;
(xxxiii) amino acids 857-892 of SEQ ID NO:3461;
(xxxiv) amino acids 858-891 of SEQ ID NO:3461;
(xxxv) amino acids 859-907 of SEQ ID NO:3461;
(xxxvi) amino acids 861-909 of SEQ ID NO:3461;
(xxxvii) amino acids 867-901 of SEQ ID NO:3461;
(xxxviii) amino acids 872-905 of SEQ ID NO:3461;
(xxxix) amino acids 880-909 of SEQ ID NO:3461;
(xl) amino acids 880-905 of SEQ ID NO:3461;
(xli) amino acids 881-920 of SEQ ID NO:3461;
(xlii) amino acids 886-909 of SEQ ID NO:3461;
(xliii) amino acids 897-947 of SEQ ID NO:3461;
(xliv) amino acids 904-941 of SEQ ID NO:3461;
(xlv) amino acids 975-1089 of SEQ ID NO:3461;
(xlvi) amino acids 1021-1089 of SEQ ID NO:3461;
(xlvii) amino acids 1065-1124 of SEQ ID NO:3461;
(xlviii) amino acids 1079-1103 of SEQ ID NO:3461;
(xlix) amino acids 1087-1109 of SEQ ID NO:3461;
(l) amino acids 1088-1124 of SEQ ID NO:3461; and
(li) amino acids 1089-1120 of SEQ ID NO:3461

62. The method of claim 42, wherein said polypeptide, variant, or fragment thereof, is selected from the group consisting of:
(i) amino acids 12-34 of SEQ ID NO:3462;
(ii) amino acids 110-267 of SEQ ID NO:3462;
(iii) amino acids 266-381 of SEQ ID NO:3462;
(iv) amino acids 384-566 of SEQ ID NO:3462;
(v) amino acids 790-822 of SEQ ID NO:3462;
(vi) amino acids 829-870 of SEQ ID NO:3462;
(vii) amino acids 1036-1073 of SEQ ID NO:3462;
(viii) amino acids 1085-1107 of SEQ ID NO:3462;
(ix) amino acids 74-220 of SEQ ID NO:3462;
(x) amino acids 163-201 of SEQ ID NO:3462;
(xi) amino acids 306-533 of SEQ ID NO:3462;
(xii) amino acids 321-378 of SEQ ID NO:3462;
(xiii) amino acids 425-617 of SEQ ID NO:3462;
(xiv) amino acids 427-465 of SEQ ID NO:3462;
(xv) amino acids 429-459 of SEQ ID NO:3462;
(xvi) amino acids 597-621 of SEQ ID NO:3462;
(xvii) amino acids 608-706 of SEQ ID NO:3462;
(xviii) amino acids 617-645 of SEQ ID NO:3462;
(xix) amino acids 666-801 of SEQ ID NO:3462;
(xx) amino acids 672-750 of SEQ ID NO:3462;
(xxi) amino acids 749-789 of SEQ ID NO:3462;
(xxii) amino acids 755-810 of SEQ ID NO:3462;
(xxiii) amino acids 770-841 of SEQ ID NO:3462;
(xxiv) amino acids 773-821 of SEQ ID NO:3462;
(xxv) amino acids 781-830 of SEQ ID NO:3462;
(xxvi) amino acids 781-841 of SEQ ID NO:3462;
(xxvii) amino acids 785-909 of SEQ ID NO:3462;
(xxviii) amino acids 785-847 of SEQ ID NO:3462;
(xxix) amino acids 789-833 of SEQ ID NO:3462;
(xxx) amino acids 796-852 of SEQ ID NO:3462;
(xxxi) amino acids 800-821 of SEQ ID NO:3462;
(xxxii) amino acids 802-846 of SEQ ID NO:3462;
(xxxiii) amino acids 804-842 of SEQ ID NO:3462;
(xxxiv) amino acids 806-841 of SEQ ID NO:3462;
(xxxv) amino acids 807-840 of SEQ ID NO:3462;
(xxxvi) amino acids 808-856 of SEQ ID NO:3462;
(xxxvii) amino acids 810-858 of SEQ ID NO:3462;
(xxxviii) amino acids 816-850 of SEQ ID NO:3462;
(xxxix) amino acids 821-854 of SEQ ID NO:3462;
(xl) amino acids 829-858 of SEQ ID NO:3462;
(xli) amino acids 829-854 of SEQ ID NO:3462;
(xlii) amino acids 830-869 of SEQ ID NO:3462;
(xliii) amino acids 835-858 of SEQ ID NO:3462;
(xliv) amino acids 846-896 of SEQ ID NO:3462;
(xlv) amino acids 853-890 of SEQ ID NO:3462;
(xlvi) amino acids 924-1038 of SEQ ID NO:3462;
(xlvii) amino acids 970-1038 of SEQ ID NO:3462;
(xlviii) amino acids 1014-1073 of SEQ ID NO:3462;
(xlix) amino acids 1028-1052 of SEQ ID NO:3462;
(l) amino acids 1036-1058 of SEQ ID NO:3462;
(li) amino acids 1037-1073 of SEQ ID NO:3462; and
(lii) amino acids 1038-1069 of SEQ ID NO:3462.

63. The method of claim 42, wherein said polypeptide, variant, or fragment thereof is selected from the group consisting of:
(i) amino acids 1-2128 of SEQ ID NO:3458;
(ii) amino acids 1-1255 of SEQ ID NO:3459;
(iii) amino acids 1-1827 of SEQ ID NO:3460;
(iv) amino acids 1-1135 of SEQ ID NO:3461; and
(v) amino acids 35-1084 of SEQ ID NO:3462.

64-113. (canceled)

114. A method of detecting abnormal hyperproliferative cell growth in a patient comprising:
(a) obtaining a biological sample from the patient;
(b) contacting said sample with a binding molecule which specifically binds to a polypeptide, variant, or fragment thereof, which is at least 70% identical to a colon tumor-associated polypeptide selected from the group consisting of:
(i) SEQ ID NO:1288
(ii) SEQ ID NO:3446;
(iii) SEQ ID NO:3447;
(iv) SEQ ID NO:3448;
(v) SEQ ID NO:3449;
(vi) SEQ ID NO:3450;
(vii) SEQ ID NO:3451;
(viii) SEQ ID NO:3452;
(ix) SEQ ID NO:3458;
(x) SEQ ID NO:3459;
(xi) SEQ ID NO:3460;
(xii) SEQ ID NO:3461; and
(xiii) SEQ ID NO:3462;
(c) assaying the expression level of said colon tumor-associated polypeptide in said sample.

115-124. (canceled)

125. A method of diagnosing a hyperproliferative disease or disorder in a patient, comprising:
(a) administering to said patient a sufficient amount of a detectably labeled binding molecule which specifically binds to a polypeptide, variant, or fragment thereof, which is at least 70% identical to a colon tumor-associated polypeptide selected from the group consisting of:
(i) SEQ ID NO:1288
(ii) SEQ ID NO:3446;
(iii) SEQ ID NO:3447;
(iv) SEQ ID NO:3448;
(v) SEQ ID NO:3449;
(vi) SEQ ID NO:3450;
(vii) SEQ ID NO:3451;
(viii) SEQ ID NO:3452;
(ix) SEQ ID NO:3458;
(x) SEQ ID NO:3459;
(xi) SEQ ID NO:3460;
(xii) SEQ ID NO:3461; and
(xiii) SEQ ID NO:3462;
(b) waiting for a time interval following said administration to allow said binding molecule to contact said polypeptide, variant, or fragment thereof; and
(c) detecting the amount of said binding molecule bound to said polypeptide, variant of fragment thereof in said patient.

126-193. (canceled)

194. A polynucleotide, variant, or fragment thereof, which is at least 85% identical to a nucleic acid molecule selected from the group consisting of SEQ ID NO: 142, SEQ ID NOs: 3439-3445 and SEQ ID NOs: 3453-3457.

195. The polynucleotide of claim 194 which is at least 90% identical to a nucleic acid molecule selected from the group consisting of SEQ ID NO: 142, SEQ ID NOs: 3439-3445 and SEQ ID NOs: 3453-3457.

196. The polynucleotide of claim 195 which is at least 95% identical to a nucleic acid molecule selected from the group consisting of SEQ ID NO: 142, SEQ ID NOs: 3439-3445 and SEQ ID NOs: 3453-3457.

197. The polynucleotide of claim 196 which is at least 100% identical to a nucleic acid molecule selected from the group consisting of SEQ ID NO: 142, SEQ ID NOs: 3439-3445 and SEQ ID NOs: 3453-3457.

198. A polypeptide, variant, or fragment thereof, which is at least 85% identical to a nucleic acid molecule selected from the group consisting of SEQ ID NO: 1228, SEQ ID NOs: 3446-3452 and SEQ ID NOs: 3458-3462.

199. The polypeptide of claim 198 which is at least 90% identical to a nucleic acid molecule selected from the group consisting of SEQ ID NO: 1228, SEQ ID NOs: 3446-3452 and SEQ ID NOs: 3458-3462.

200. The polynucleotide of claim 199 which is at least 95% identical to a nucleic acid molecule selected from the group consisting of SEQ ID NO: 1228, SEQ ID NOs: 3446-3452 and SEQ ID NOs: 3458-3462.

201. The polynucleotide of claim 200 which is at least 100% identical to a nucleic acid molecule selected from the group consisting of SEQ ID NO: 1228, SEQ ID NOs: 3446-3452 and SEQ ID NOs: 3458-3462.
